(19) United States
(12) Patent Application Publication
(10) Pub. No.: US 2022/0177883 A1
(43) Pub. Date: Jun. 9, 2022

(54) Antisense Oligonucleotides Targeting ATXN3

(71) Applicant: Hoffmann-La Roche Inc., Little Falls, NJ (US)

(72) Inventors: Heidi Rye Hudlebusch, Bronshoj (DK); Lykke Pedersen, Kobenhavn (DK); Erik Funder, Hillerod (DK); Lukasz Kielpinski, Horsholm (DK); Christoffer Sondergaard, Capital (DK); Alexander Herbert Stephan, Basel-City (CH)

(21) Appl. No.: 17/540,569

(22) Filed: Dec. 2, 2021

(30) Foreign Application Priority Data
Dec. 3, 2020 (EP) EP20211618.2

(51) Int. Cl. C12N 15/113; A61K 31/7088; A61P 25/28

(52) U.S. Cl. CPC C12N 15/113; A61K 31/7088; A61P 25/28; C12N 2310/11; C12N 2310/14; C12N 2310/341; C12N 2310/314; C12N 2310/315; C12N 2310/321; C12N 2310/322; C12N 2310/3341; C12N 2310/3231

(57) ABSTRACT

The present invention relates to antisense LNA oligonucleotides (oligomers) complementary to ATXN3 pre-mRNA sequences, which are capable of inhibiting the expression of ATXN3 protein. Inhibition of ATXN3 expression is beneficial for the treatment of spinocerebellar ataxia.

### CROSS REFERENCE TO RELATED APPLICATIONS

[0001] This application claims benefit of and priority to the European Patent Application EP 20211618.2 filed on Dec. 3, 2020, all of which are incorporated by reference in their entireties where permissible.

### TECHNICAL FIELD OF THE INVENTION

[0002] The present invention relates to antisense LNA oligonucleotides (oligomers) complementary to ATXN3 pre-mRNA sequences, which are capable of inhibiting the expression of ATXN3. Inhibition of ATXN3 expression is beneficial for the treatment of spinocerebellar ataxia, such as spinocerebellar ataxia 3 (Machado-Joseph disease (MJD)).

### REFERENCE TO SEQUENCE LISTING

[0003] The instant application contains a Sequence Listing which has been submitted electronically in ASCII format and is hereby incorporated by reference in its entirety. Said ASCII copy, created on Dec. 3, 2020, is named 067211_015US1 SL.txt and is 614,400 bytes in size.

### BACKGROUND OF THE INVENTION

[0004] Spinocerebellar ataxia type 3 (SCA3), also known as Machado-Joseph disease (MJD), is one of nine polyglutamine expansion diseases and the most common dominantly inherited ataxia in the world. While certain symptoms in SCA3 may respond to symptomatic therapy, there is still no effective treatment for this relentlessly progressive and fatal neurodegenerative disease. The disease is caused by a CAG repeat expansion in the ATXN3 gene that encodes an abnormally long polyglutamine tract in the disease protein, ATXN3 (Ataxin 3). The toxic ataxin-3 protein is associated with aggregates which are frequently observed in the brain tissue of SCA3 patients.

[0005] Moore et al. reported that antisense oligonucleotides (ASOs) targeting ATXN3 were capable of reducing levels of the pathogenic ATXN3 protein both in human disease fibroblasts and in a mouse model expressing the full-length human mutant ATXN3 gene (Moore et al., Mol Ther Nucleic Acids. 2017; 7:200-210). Therefore, ASO-mediated targeting of ATXN3 was suggested as therapeutic approach for SCA3.

[0006] Swayze et al. (Nucleic Acids Res. 2007; 35(2):687-700. Epub 2006 Dec. 19), reports that antisense oligonucleotides containing locked nucleic acid have the potential to improve potency but cause significant toxicity in animals (hepatotoxicity).

[0007] Toonen et al. used antisense oligonucleotides to mask predicted exonic splicing signals of ATXN3, resulting in exon 10 skipping from ATXN3 pre-mRNA. The skipping of exon 10 led to formation of a truncated ataxin-3 protein lacking the toxic polyglutamine expansion, but retaining its ubiquitin binding and cleavage function (Toonen et al., Molecular Therapy—Nucleic Acids, 2017, Volume 8: 232-242).

[0008] WO2013/138353, WO2015/017675, WO2018/089805, WO2019/217708 and WO2020/172559 disclose antisense oligonucleotides targeting human ATXN3 mRNA for use in the treatment of SCA3.

### SUMMARY OF THE INVENTION

[0009] The present invention identifies regions of the ATXN3 transcript (ATXN3) for antisense inhibition in vitro or in vivo, and provides for antisense oligonucleotides, including LNA gapmer oligonucleotides, which target these regions of the ATXN3 pre-mRNA or mature mRNA. Particularly, the present invention identifies antisense oligonucleotides which target human ATXN3 pre-mRNA or mature mRNA more effectively than they target the human Potassium Voltage-Gated Channel Subfamily B Member 2 (KCNB2) pre-mRNA or mature mRNA. The present invention identifies oligonucleotides which inhibit human ATXN3 which are useful in the treatment of spinocerebellar ataxia.

[0010] The invention provides for an antisense oligonucleotide, 10-30 nucleotides in length, targeting a mammalian ATXN3 (Ataxin 3) target nucleic acid, wherein the antisense oligonucleotide is capable of inhibiting the expression of mammalian ATXN3 in a cell which is expressing mammalian ATXN3. The mammalian ATXN3 target nucleic acid may be, e.g., a human, monkey or mouse ATXN3 target nucleic acid.

[0011] The invention also provides for an LNA gapmer antisense oligonucleotide, 10-30 nucleotides in length, wherein said antisense oligonucleotide comprises a contiguous nucleotide sequence 10-30 nucleotides in length, wherein the contiguous nucleotide sequence is at least 90% complementary, such as fully complementary, to SEQ ID NO:1, wherein the antisense oligonucleotide is capable of inhibiting the expression of human ATXN3 in a cell which is expressing human ATXN3.

[0012] In one aspect, the invention provides for an antisense oligonucleotide comprising a contiguous nucleotide sequence comprising the contiguous nucleotides present in SEQ ID NO:1122 except for one or more modified nucleosides and/or one or more modified internucleoside linkages, wherein the antisense oligonucleotide is capable of inhibiting the expression of human ATXN3 in a cell which is expressing human ATXN3; or a pharmaceutically acceptable salt thereof. In some embodiments, the antisense oligonucleotide is more capable of inhibiting the expression of human ATXN3 than human KCNB2 in a cell which is expressing human ATXN3 and human KCNB2. In some embodiments, the one or more modified nucleosides and/or one or more modified internucleoside linkages are, for each residue in SEQ ID NO:1122, independently selected from the options for that residue as shown in Table 15.

[0013] In some embodiments, the antisense oligonucleotide comprises a contiguous nucleotide sequence comprising at least 10, such as at least 12, such as at least 14, such as at least 16 contiguous nucleotides present in SEQ ID NO:1122. In some embodiments, the antisense oligonucleotide comprises the contiguous nucleotide sequence of SEQ ID NO: 1122.

[0014] In some embodiments, the antisense oligonucleotide comprises a contiguous nucleotide sequence comprising the base sequence of an antisense oligonucleotide selected from the group consisting of Compound ID Nos. 1122_82 to 1122_336, shown in Table 11.

[0015] In some embodiments, the antisense oligonucleotide comprises a contiguous nucleotide sequence comprising the nucleoside base sequence and, optionally, the sugar moiety modifications, of an antisense oligonucleotide selected from the group consisting of Compound ID Nos. 1122_91, 1122_107, 1122_154, 1122_155, 1122_156, 1122_157, 1122_158, 1122_167, 1122_172, 1122_175, 1122_294, and 1122_296, shown in Table 14.

[0016] In some embodiments, the antisense oligonucleotide is an LNA gapmer antisense oligonucleotide; or a pharmaceutically acceptable salt thereof. Typically, each LNA cytosine is an LNA 5-methyl cytosine.

[0017] In some embodiments, substantially all, or all, internucleoside linkages between the nucleosides are phosphorothioate internucleoside linkages. In some particular embodiments, one or more of the phosphothioate internucleoside linkages are stereodefined.

[0018] In some embodiments, one or more nucleosides are also or alternatively modified to a 2′-sugar-modified nucleoside.

[0019] In some embodiments, one or more cytosine nucleosides are also or alternatively modified to a 5-methyl cytosine nucleoside.

[0020] In some embodiments, one or more thymine nucleosides are modified to a uracil nucleoside.

[0021] In one aspect, the invention provides for an antisense oligonucleotide comprising a contiguous nucleotide sequence comprising the contiguous nucleotides present in SEQ ID NO:1816 except for one or more modified nucleosides and/or one or more modified internucleoside linkages, wherein the antisense oligonucleotide is capable of inhibiting the expression of human ATXN3 in a cell which is expressing human ATXN3; or a pharmaceutically acceptable salt thereof. In some embodiments, the antisense oligonucleotide is more capable of inhibiting the expression of human ATXN3 than human KCNB2 in a cell which is expressing human ATXN3 and human KCNB2. In some embodiments, the one or more modified nucleosides and/or one or more modified internucleoside linkages are, for each residue in SEQ ID NO:1816, independently selected from the options for that residue as shown in Table 16.

[0022] In some embodiments, the antisense oligonucleotide comprises a contiguous nucleotide sequence comprising at least 10, such as at least 12, such as at least 14, such as at least 16 contiguous nucleotides present in SEQ ID NO:1816. In some embodiments, the antisense oligonucleotide comprises the contiguous nucleotide sequence of SEQ ID NO: 1816.

[0023] In some embodiments, the antisense oligonucleotide comprises a contiguous nucleotide sequence comprising the base sequence of an antisense oligonucleotide selected from the group consisting of Compound ID Nos. 1816_2 to 1816_74, shown in Table 11.

[0024] In some embodiments, the antisense oligonucleotide comprises the nucleoside base sequence and, optionally, the sugar moiety modifications, of an antisense oligonucleotide selected from the group consisting of Compound ID Nos. 1816_13, 1816_15, 1816_28, 1816_41, 1816_42, 1816_43, 1816_60, 1816_61, 1816_64, 1816_65, and 1816_68, as shown in Table 14.

[0025] In some embodiments, the antisense oligonucleotide is an LNA gapmer antisense oligonucleotide; or a pharmaceutically acceptable salt thereof. Typically, each LNA cytosine is an LNA 5-methyl cytosine.

[0026] In some embodiments, substantially all, or all, internucleoside linkages between the nucleosides are phosphorothioate internucleoside linkages. In some particular embodiments, one or more of the phosphothioate internucleoside linkages are stereodefined.

[0027] In some embodiments, one or more nucleosides are also or alternatively modified to a 2′-sugar-modified nucleoside.

[0028] In some embodiments, one or more cytosine nucleosides are also or alternatively modified to a 5-methyl cytosine nucleoside.

[0029] In some embodiments, one or more thymine nucleosides are modified to a uracil nucleoside.

[0030] More details on these or other nucleoside modifications and/or internucleoside linkage modifications are provided in the present disclosure.

[0031] In one aspect, the invention provides for the antisense oligonucleotides disclosed herein, for example an antisense oligonucleotide selected from the group consisting of the compounds shown in the table in Example 13; or a pharmaceutically acceptable salt thereof.

[0032] In one aspect, the invention provides for the antisense oligonucleotide disclosed herein, for example an antisense oligonucleotide selected from the group consisting of the compounds shown in Table 11; or a pharmaceutically acceptable salt thereof.

[0033] In some embodiments, the antisense oligonucleotide is selected from the group consisting of the compounds shown in the table in Example 16.

[0034] In some embodiments, the antisense oligonucleotide is selected from the group consisting of the compounds shown in Table 14.

[0035] In one aspect, the invention particularly provides for an antisense oligonucleotide selected from the group consisting of Compound ID Nos. 1122_91, 1122_107, 1122_154, 1122_155, 1122_156, 1122_157, 1122_158, 1122_167, 1122_172, 1122_175, 1122_294, 1122_296, 1816_13, 1816_15, 1816_28, 1816_41, 1816_42, 1816_43, 1816_60, 1816_61, 1816_64, 1816_65, and 1816_68; or a pharmaceutically acceptable salt thereof.

[0036] In separate and specific aspects, the invention provides for an antisense oligonucleotide as shown in FIG. 12A, 12B, 12C, 12D, 12E, 12F, 12G, 12H, 12I, 12J, 12K, 12L, 12M, 12N, 12O, 12P, 12Q, 12R, 12S, 12T, 12U, 12V, or 12W; or a pharmaceutically acceptable salt thereof. A oligonucleotide of the invention as referred to or claimed herein may be in the form of a pharmaceutically acceptable salt, such as a sodium or potassium salt.

[0037] In one aspect, the invention provides for a conjugate comprising an oligonucleotide according to the invention, and at least one conjugate moiety covalently attached to said oligonucleotide.

[0038] In one aspect, the invention provides for a pharmaceutical composition comprising the oligonucleotide or conjugate of the invention and a pharmaceutically acceptable diluent, solvent, carrier, salt and/or adjuvant.

[0039] In one aspect, the invention provides for an in vivo or in vitro method for modulating ATXN3 expression in a target cell which is expressing ATXN3, said method comprising administering an oligonucleotide or conjugate or pharmaceutical composition of the invention in an effective amount to said cell.

[0040] In one aspect, the invention provides for a method for treating or preventing a disease comprising administering a therapeutically or prophylactically effective amount of an oligonucleotide, conjugate or the pharmaceutical composition of the invention to a subject suffering from or susceptible to the disease.

[0041] In some embodiments, the disease is spinocerebellar ataxia, such as spinocerebellar ataxia 3, such as Machado-Joseph disease (MJD).

[0042] In one aspect, the invention provides for the oligonucleotide, conjugate or the pharmaceutical composition of the invention for use in medicine.

[0043] In one aspect, the invention provides for the oligonucleotide, conjugate or the pharmaceutical composition of the invention for use in the treatment or prevention of spinocerebellar ataxia, such as spinocerebellar ataxia 3, such as Machado-Joseph disease (MJD).

[0044] In one aspect, the invention provides for the use of the oligonucleotide, conjugate or the pharmaceutical composition of the invention, for the preparation of a medicament for treatment or prevention of spinocerebellar ataxia, such as spinocerebellar ataxia 3 such as Machado-Joseph disease (MJD).

### BRIEF DESCRIPTION OF THE DRAWINGS

[0045] FIG. 1 displays a drawing of the compound 1122_67 (SEQ ID NO:1122).

[0046] FIG. 2 displays a drawing of the compound 1813_1 (SEQ ID NO:1813).

[0047] FIG. 3 displays a drawing of the compound 1856_1 (SEQ ID NO:1856).

[0048] FIG. 4 displays a drawing of the compound 1812_1 (SEQ ID NO:1812).

[0049] FIG. 5 displays a drawing of the compound 1809_2 (SEQ ID NO:1809).

[0050] FIG. 6 displays a drawing of the compound 1607_1 (SEQ ID NO:1607).

[0051] FIG. 7 displays a drawing of the compound 1122_62 (SEQ ID NO:1122).

[0052] FIG. 8 displays a drawing of the compound 1122_33 (SEQ ID NO:1122).

[0053] FIG. 9 portrays the stability of the compounds 1122_67 and 1813_1, and 5 reference compounds (i.e. compounds 1100673, 1101657, 1102130, 1103014, and 1102987) in a 24 hour SVPD assay.

[0054] FIG. 10A displays a WES analysis of GM06153 cells treated with different ASOs to obtain reduction of wild type Ataxin 3 (55 kDa) and polyQ extended Ataxin 3 (77 kDa). FIG. 10B displays an analysis of band intensity normalized to HPRT. Wild type Ataxin 3 is represented by the band at 55 kDa, and the polyQ extended Ataxin 3 is represented by the band at 77 kDa. Cells have been treated with 10 uM of ASO for 4 days prior to protein analysis. Data represents cells treated with ASOs in triplicates as mean+-SD. SC, scrambled control oligo.

[0055] FIG. 11 displays a drawing of the compound 1816_12.

[0056] FIGS. 12A-W display drawings of the compounds in Table 14 (Example 16). FIG. 12A displays a drawing of compound 1122_91. FIG. 12B displays a drawing of compound 1122_107. FIG. 12C displays a drawing of compound 1122_154. FIG. 12D displays a drawing of compound 1122_155. FIG. 12E displays a drawing of compound 1122_156. FIG. 12F displays a drawing of compound 1122_157. FIG. 12G displays a drawing of compound 1122_158. FIG. 12H displays a drawing of compound 1122_167. FIG. 12I displays a drawing of compound 1122_172. FIG. 12J displays a drawing of compound 1122_175. FIG. 12K displays a drawing of compound 1122_294. FIG. 12L displays a drawing of compound 1122_296. FIG. 12M displays a drawing of compound 1816_13. FIG. 12N displays a drawing of compound 1816_15. FIG. 12O displays a drawing of compound 1816_28. FIG. 12P displays a drawing of compound 1816_41. FIG. 12Q displays a drawing of compound 1816_42. FIG. 12R displays a drawing of compound 1816_43. FIG. 12S displays a drawing of compound 1816_60. FIG. 12T displays a drawing of compound 1816_61. FIG. 12U displays a drawing of compound 1816_64. FIG. 12V displays a drawing of compound 1816_65. FIG. 12W displays a drawing of compound 1816_68.

[0057] The chemical drawings show the protonated form of the antisense oligonucleotide, and it will be understood that each hydrogen on the sulphur atom in the phosphorothioate intemucleoside linkage may independently be present or absent. In a salt form, one or more more of the hydrogens may for example be replaced with a cation, such as a metal cation, such as a sodium cation or a potassium cation.

[0058] FIG. 13 displays an image showing raw results from the WES analysis of protein level. Included are compounds 1605_4, 1122_107, 1122_156 and a scrambled control oligo.

[0059] FIG. 14 displays an image showing raw results from the WES analysis of protein level. Included are compounds 1287095, 1102579, 1605_2 and a scrambled control oligo.

[0060] FIG. 15 displays an analysis of band intensity normalized to HPRT. Cells have been treated with 5 μM of ASO for 4 days prior to protein analysis. Data represents cells treated with ASOs in triplicates as mean+-SD. * p-value<0.05; ** p-value<0.01.

[0061] FIG. 16 displays a WES analysis of SK-N-AS cells treated with different ASOs to obtain reduction of wild type Ataxin 3 (55 kDa). The loading control used for normalization was HPRT.

[0062] FIG. 17 displays a WES analysis of SK-N-AS cells treated with different reference compound ASOs to obtain reduction of wild type Ataxin 3 (55 kDa). The loading control used for normalization was HPRT.

[0063] FIG. 18 displays an analysis of band intensity normalized to HPRT. Cells were treated with 5 or 15 uM of ASO for 4 days prior to protein analysis. Data represents cells treated with ASOs in triplicates as mean+-SD.

[0064] FIG. 19 displays results from ddPCR analysis showing remaining level of ATXN3 mRNA following treatment with the listed compounds.

### DETAILED DESCRIPTION OF THE INVENTION

### I. Definitions

[0065] It should be appreciated that this disclosure is not limited to the compositions and methods described herein as well as the experimental conditions described, as such may vary. It is also to be understood that the terminology used herein is for the purpose of describing certain embodiments only, and is not intended to be limiting, since the scope of the present disclosure will be limited only by the appended claims.

[0066] Unless defined otherwise, all technical and scientific terms used herein have the same meaning as commonly understood by one of ordinary skill in the art to which this disclosure belongs. Although any compositions, methods and materials similar or equivalent to those described herein can be used in the practice or testing of the present invention. All publications mentioned are incorporated herein by reference in their entirety.

[0067] The use of the terms “a,” “an,” “the,” and similar referents in the context of describing the presently claimed invention (especially in the context of the claims) are to be construed to cover both the singular and the plural, unless otherwise indicated herein or clearly contradicted by context.

[0068] Recitation of ranges of values herein are merely intended to serve as a shorthand method of referring individually to each separate value falling within the range, unless otherwise indicated herein, and each separate value is incorporated into the specification as if it were individually recited herein.

[0069] Use of the term “about” is intended to describe values either above or below the stated value in a range of approx. +/−10%; in other embodiments the values may range in value either above or below the stated value in a range of approx. +/−5%; in other embodiments the values may range in value either above or below the stated value in a range of approx. +/−2%; in other embodiments the values may range in value either above or below the stated value in a range of approx. +/−1%. The preceding ranges are intended to be made clear by context, and no further limitation is implied. All methods described herein can be performed in any suitable order unless otherwise indicated herein or otherwise clearly contradicted by context. The use of any and all examples, or exemplary language (e.g., “such as”) provided herein, is intended merely to better illuminate the invention and does not pose a limitation on the scope of the invention unless otherwise claimed. No language in the specification should be construed as indicating any non-claimed element as essential to the practice of the invention.

[0070] As used herein, the terms “treat,” “treating,” “treatment” and “therapeutic use” refer to the elimination, reduction or amelioration of one or more symptoms of a disease or disorder. Specifically, the term “treatment” may refer to both treatment of an existing disease (e.g. a disease or disorder as herein referred to), or prevention of a disease (i.e. prophylaxis). It will therefore be recognized that treatment as referred to herein may, in some embodiments, be prophylactic. As used herein, a “therapeutically effective amount” refers to that amount of a therapeutic agent sufficient to mediate a clinically relevant elimination, reduction or amelioration of such symptoms. An effect is clinically relevant if its magnitude is sufficient to impact the health or prognosis of a recipient subject. A therapeutically effective amount may refer to the amount of therapeutic agent sufficient to delay or minimize the onset of disease. A therapeutically effective amount may also refer to the amount of the therapeutic agent that provides a therapeutic benefit in the treatment or management of a disease.

[0071] The term “oligonucleotide” as used herein is defined as it is generally understood by the skilled person as a molecule comprising two or more covalently linked nucleosides. Such covalently bound nucleosides may also be referred to as nucleic acid molecules or oligomers. Oligonucleotides are commonly made in the laboratory by solid-phase chemical synthesis followed by purification. When referring to a sequence of the oligonucleotide, reference is made to the sequence or order of nucleobase moieties, or modifications thereof, of the covalently linked nucleotides or nucleosides. The oligonucleotide of the invention is man-made, and is chemically synthesized, and is typically purified or isolated. The oligonucleotide of the invention may comprise one or more modified nucleosides or nucleotides.

[0072] The term “Antisense oligonucleotide” as used herein is defined as oligonucleotides capable of modulating expression of a target gene by hybridizing to a target nucleic acid, in particular to a contiguous sequence on a target nucleic acid. The antisense oligonucleotides are not essentially double stranded and are therefore not siRNAs or shRNAs. Preferably, the antisense oligonucleotides of the present invention are single stranded. It is understood that single stranded oligonucleotides of the present invention can form hairpins or intermolecular duplex structures (duplex between two molecules of the same oligonucleotide), as long as the degree of intra or inter self-complementarity is less than 50% across of the full length of the oligonucleotide.

[0073] The term “contiguous nucleotide sequence” refers to the region of the oligonucleotide which is complementary to the target nucleic acid. The term is used interchangeably herein with the term “contiguous nucleobase sequence” and the term “oligonucleotide motif sequence” also refered to as “motif sequence”. The “motif sequence” may also be referred to as the “Oligonucleotide Base Sequence”. In some embodiments all the nucleotides of the oligonucleotide constitute the contiguous nucleotide sequence. In some embodiments the oligonucleotide comprises the contiguous nucleotide sequence, such as a F-G-F′ gapmer region, and may optionally comprise further nucleotide(s), for example a nucleotide linker region which may be used to attach a functional group to the contiguous nucleotide sequence. The nucleotide linker region may or may not be complementary to the target nucleic acid. Advantageously, the contiguous nucleotide sequence is 100% complementary to the target nucleic acid.

[0074] The term “modified oligonucleotide” describes an oligonucleotide comprising one or more modified nucleosides and/or modified internucleoside linkages. The term chimeric” oligonucleotide is a term that has been used in the literature to describe oligonucleotides with modified nucleosides.

[0075] The term “nucleotides” refers to the building blocks of oligonucleotides and polynucleotides, and for the purposes of the present invention include both naturally occurring and non-naturally occurring nucleotides. In nature, nucleotides, such as DNA and RNA nucleotides comprise a ribose sugar moiety, a nucleobase moiety and one or more phosphate groups (which is absent in nucleosides). Nucleosides and nucleotides may also interchangeably be referred to as “units” or “monomers”.

[0076] The term “nucleobase” refers to the purine (e.g. adenine and guanine) and pyrimidine (e.g. uracil, thymine and cytosine) moieties present in nucleosides and nucleotides which form hydrogen bonds in nucleic acid hybridization. In the context of the present invention the term nucleobase also encompasses modified nucleobases which may differ from naturally occurring nucleobases, but are functional during nucleic acid hybridization. In this context “nucleobase” refers to both naturally occurring nucleobases such as adenine, guanine, cytosine, thymidine, uracil, xanthine and hypoxanthine, as well as non-naturally occurring variants. Such variants are for example described in Hirao et al (2012) Accounts of Chemical Research vol 45 page 2055 and Bergstrom (2009) Current Protocols in Nucleic Acid Chemistry Suppl. 37 1.4.1.

[0077] In some embodiments, the “nucleobase moiety” is modified by changing the purine or pyrimidine into a modified purine or pyrimidine, such as substituted purine or substituted pyrimidine, such as a nucleobased selected from isocytosine, pseudoisocytosine, 5-methyl cytosine, 5-thiozolo-cytosine, 5-propynyl-cytosine, 5-propynyl-uracil, 5-bromouracil 5-thiazolo-uracil, 2-thio-uracil, 2′thio-thymine, inosine, diaminopurine, 6-aminopurine, 2-aminopurine, 2,6-diaminopurine and 2-chloro-6-aminopurine.

[0078] The nucleobase moieties may be indicated by the letter code for each corresponding nucleobase, e.g. A, T, G, C or U, wherein each letter may optionally include modified nucleobases of equivalent function. For example, in the exemplified oligonucleotides, the nucleobase moieties are selected from A, T, G, C, and 5-methyl cytosine. Optionally, for LNA gapmers, 5-methyl cytosine LNA nucleosides may be used.

[0079] The term “modified nucleoside” or “nucleoside modification” as used herein refers to nucleosides modified as compared to the equivalent DNA or RNA nucleoside by the introduction of one or more modifications of the sugar moiety or the (nucleo) base moiety. In a preferred embodiment, the modified nucleoside comprises a modified sugar moiety. The term modified nucleoside may also be used herein interchangeably with the term “nucleoside analogue” or modified “units” or modified “monomers”. Nucleosides with an unmodified DNA or RNA sugar moiety are termed DNA or RNA nucleosides herein. Nucleosides with modifications in the base region of the DNA or RNA nucleoside are still generally termed DNA or RNA if they allow Watson Crick base pairing.

[0080] The oligomer of the invention may comprise one or more nucleosides which have a modified sugar moiety, i.e. a modification of the sugar moiety when compared to the ribose sugar moiety found in DNA and RNA.

[0081] Numerous nucleosides with modification of the ribose sugar moiety have been made, primarily with the aim of improving certain properties of oligonucleotides, such as affinity and/or nuclease resistance.

[0082] Such modifications include those where the ribose ring structure is modified, e.g. by replacement with a hexose ring (HNA), or a bicyclic ring, which typically have a biradicle bridge between the C2 and C4 carbons on the ribose ring (LNA), or an unlinked ribose ring which typically lacks a bond between the C2 and C3 carbons (e.g. UNA). Other sugar modified nucleosides include, for example, bicyclohexose nucleic acids (WO2011/017521) or tricyclic nucleic acids (WO2013/154798). Modified nucleosides also include nucleosides where the sugar moiety is replaced with a non-sugar moiety, for example in the case of peptide nucleic acids (PNA), or morpholino nucleic acids.

[0083] As used herein, “sugar modifications” also include modifications made via altering the substituent groups on the ribose ring to groups other than hydrogen, or the 2′—OH group naturally found in DNA and RNA nucleosides. Substituents may, for example be introduced at the 2′, 3′, 4′ or 5′ positions.

[0084] As used herein, a “2′ sugar modified nucleoside” refers to a nucleoside which has a substituent other than H or OH at the 2′ position (2′ substituted nucleoside) or comprises a 2′ linked biradicle capable of forming a bridge between the 2′ carbon and a second carbon in the ribose ring, such as LNA (2′ 4′ biradicle bridged) nucleosides.

[0085] Indeed, much focus has been spent on developing 2′ substituted nucleosides, and numerous 2′ substituted nucleosides have been found to have beneficial properties when incorporated into oligonucleotides. For example, the 2′ modified sugar may provide enhanced binding affinity and/or increased nuclease resistance to the oligonucleotide. Examples of 2′ substituted modified nucleosides are 2′-O-alkyl-RNA, 2′-O-methyl-RNA, 2′-alkoxy-RNA, 2′-O-methoxyethyl-RNA (MOE), 2′-amino-DNA, 2′-Fluoro-RNA, and 2′-F-ANA nucleoside. For further examples, please see e.g. Freier & Altmann; Nucl. Acid Res., 1997, 25, 4429-4443 and Uhlmann; Curr. Opinion in Drug Development, 2000, 3(2), 293-213, and Deleavey and Damha, Chemistry and Biology 2012, 19, 937. Below are illustrations of some 2′ substituted modified nucleosides.

[chemical structure]

[0086] In relation to the present invention 2′ substituted does not include 2′ bridged molecules like LNA.

[0087] As used herein, a “Locked Nucleic Acid (LNA) nucleoside” is a 2′-modified nucleoside which comprises a biradical linking the C2′ and C4′ of the ribose sugar ring of said nucleoside (also referred to as a “2′-4′ bridge”), which restricts or locks the conformation of the ribose ring. These nucleosides are also termed bridged nucleic acid or bicyclic nucleic acid (BNA) in the literature. The locking of the conformation of the ribose is associated with an enhanced affinity of hybridization (duplex stabilization) when the LNA is incorporated into an oligonucleotide for a complementary RNA or DNA molecule. This can be routinely determined by measuring the melting temperature of the oligonucleotide/complement duplex.

[0088] Non limiting, exemplary LNA nucleosides are disclosed in WO 99/014226, WO 00/66604, WO 98/039352, WO 2004/046160, WO 00/047599, WO 2007/134181, WO 2010/077578, WO 2010/036698, WO 2007/090071, WO 2009/006478, WO 2011/156202, WO 2008/154401, WO 2009/067647, WO 2008/150729, Morita et al., Bioorganic & Med. Chem. Lett. 12, 73-76, Seth et al. J. Org. Chem. 2010, Vol 75(5) pp. 1569-81, and Mitsuoka et al., Nucleic Acids Research 2009, 37(4), 1225-1238, and Wan and Seth, J. Medical Chemistry 2016, 59, 9645-9667.

[0089] Further non limiting, exemplary LNA nucleosides are disclosed in Scheme 1:

[chemical structure]

[0090] Particular LNA nucleosides are beta-D-oxy-LNA, 6′-methyl-beta-D-oxy LNA such as (S)-6′-methyl-beta-D-oxy-LNA (ScET) and ENA. A particularly advantageous LNA is beta-D-oxy-LNA.

[0091] As used herein, the term “modified internucleoside linkage” is defined as generally understood by the skilled person as linkages other than phosphodiester (PO) linkages, that covalently couples two nucleosides together. The oligonucleotides of the invention may therefore comprise modified internucleoside linkages. In some embodiments, the modified internucleoside linkage increases the nuclease resistance of the oligonucleotide compared to a phosphodiester linkage. For naturally occurring oligonucleotides, the internucleoside linkage includes phosphate groups creating a phosphodiester bond between adjacent nucleosides.

[0092] Modified internucleoside linkages are particularly useful in stabilizing oligonucleotides for in vivo use, and may serve to protect against nuclease cleavage at regions of DNA or RNA nucleosides in the oligonucleotide of the invention, for example within the gap region of a gapmer oligonucleotide, as well as in regions of modified nucleosides, such as region F and F′. In an embodiment, the oligonucleotide comprises one or more internucleoside linkages modified from the natural phosphodiester, such one or more modified internucleoside linkages that is for example more resistant to nuclease attack. Nuclease resistance may be determined by incubating the oligonucleotide in blood serum or by using a nuclease resistance assay (e.g. snake venom phosphodiesterase (SVPD)), both are well known in the art. Internucleoside linkages which are capable of enhancing the nuclease resistance of an oligonucleotide are referred to as nuclease resistant internucleoside linkages. In some embodiments at least 50% of the internucleoside linkages in the oligonucleotide, or contiguous nucleotide sequence thereof, are modified, such as at least 60%, such as at least 70%, such as at least 80 or such as at least 90% of the internucleoside linkages in the oligonucleotide, or contiguous nucleotide sequence thereof, are nuclease resistant internucleoside linkages. In some embodiments all of the internucleoside linkages of the oligonucleotide, or contiguous nucleotide sequence thereof, are nuclease resistant internucleoside linkages. It will be recognized that, in some embodiments the nucleosides which link the oligonucleotide of the invention to a non-nucleotide functional group, such as a conjugate, may be phosphodiester.

[0093] A preferred modified internucleoside linkage is phosphorothioate. Phosphorothioate internucleoside linkages are particularly useful due to nuclease resistance, beneficial pharmacokinetics and ease of manufacture. In some embodiments at least 50% of the internucleoside linkages in the oligonucleotide, or contiguous nucleotide sequence thereof, are phosphorothioate, such as at least 60%, such as at least 70%, such as at least 80% or such as at least 90% of the internucleoside linkages in the oligonucleotide, or contiguous nucleotide sequence thereof, are phosphorothioate. In some embodiments all of the internucleoside linkages of the oligonucleotide, or contiguous nucleotide sequence thereof, are phosphorothioate.

[0094] Nuclease resistant linkages, such as phosphorothioate linkages, are particularly useful in oligonucleotide regions capable of recruiting nuclease when forming a duplex with the target nucleic acid, such as region G for gapmers. Phosphorothioate linkages may, however, also be useful in non-nuclease recruiting regions and/or affinity enhancing regions such as regions F and F′ for gapmers. Gapmer oligonucleotides may, in some embodiments comprise one or more phosphodiester linkages in region F or F′, or both region F and F′, which the internucleoside linkage in region G may be fully phosphorothioate.

[0095] Advantageously, all the internucleoside linkages in the contiguous nucleotide sequence of the oligonucleotide are phosphorothioate linkages.

[0096] It is recognized that, as disclosed in EP2 742 135, antisense oligonucleotide may comprise other internucleoside linkages (other than phosphodiester and phosphorothioate), for example alkyl phosphonate/methyl phosphonate internucleosides, which according to EP2 742 135 may for example be tolerated in an otherwise DNA phosphorothioate gap region.

[0097] As used herein, “phosphorothioate linkages” refer to internucleoside phosphate linkages where one of the non-bridging oxygens has been substituted with a sulfur. The substitution of one of the non-bridging oxygens with a sulfur introduces a chiral center, and as such within a single phosphorothioate oligonucleotide, each phosphorothioate internucleoside linkage will be either in the S (Sp) or R (Rp) stereoisoforms. Such internucleoside linkages are referred to as “chiral internucleoside linkages”. By comparison, phosphodiester internucleoside linkages are non-chiral as they have two non-terminal oxygen atoms.

[0098] The designation of the chirality of a stereocenter is determined by standard Cahn-Ingold-Prelog rules (CIP priority rules) first published in Cahn, R.S.; Ingold, C.K.; Prelog, V. (1966). “Specification of Molecular Chirality”. Angewandte Chemie International Edition. 5 (4): 385-415. doi:10.1002/anie.196603851.

[0099] During standard oligonucleotide synthesis, the stereoselectivity of the coupling and the following sulfurization is not controlled. For this reason, when producing an oligonucleotide by standard oligonucleotide synthetic methods, the stereoconfiguration of any specific phosphorothioate internucleoside linkage introduced may become either Sp or Rp. The resulting preparation of such an oligonucleotide may therefore contain as many as 2^{X} different individual phosphorothioate diastereoisomers, where X is the number of phosphorothioate internucleoside linkages. Such oligonucleotides are referred to as “stereorandom phosphorothioate oligonucleotides” herein, and do not contain any stereodefined internucleoside linkages. Stereorandom phosphorothioate oligonucleotides are therefore mixtures of individual diastereoisomers originating from the non-stereodefined synthesis. In this context the mixture is defined as up to 2′ different phosphorothioate diastereoisomers. A stereorandom phosphorothioate internucleoside linkage may also be referred to as a stereo-undefined phosphorothioate internucleoside linkage or, using HELM-annotations, [sP] or (abbreviated) “X”, herein (see Examples 13 and 16).

[0100] As used herein, a “stereodefined internucleoside linkage” refers to an internucleoside linkage which introduces a specific chiral center into the oligonucleotide, which exists in predominantly one stereoisomeric form, either R or S within a population of individual oligonucleotide molecules.

[0101] It should be recognized that stereoselective oligonucleotide synthesis methods used in the art typically provide at least about 90% or at least about 95% stereoselectivity at each internucleoside linkage stereocenter, and as such up to about 10%, such as about 5% of oligonucleotide molecules may have the alternative stereo isomeric form.

In some embodiments the stereoselectivity of each stereodefined phosphorothioate stereocenter is at least about 90%. In some embodiments the stereoselectivity of each stereodefined phosphorothioate stereocenter is at least about 95%.

[0102] As used herein, “stereodefined phosphorothioate linkages” refer to phosphorothioate linkages which have been chemically synthesized in either the Rp or Sp configuration within a population of individual oligonucleotide molecules, such as at least about 90% or at least about 95% stereoselectivity at each stereocenter (either Rp or Sp), and as such up to about 10%, such as about 5% of oligonucleotide molecules may have the alternative stereo isomeric form. The stereo configurations of the phosphorothioate internucleoside linkages are presented below

[chemical structure]

where the 3′ R group represents the 3′ position of the adjacent nucleoside (a 5′ nucleoside), and the 5′ R group represents the 5′ position of the adjacent nucleoside (a 3′ nucleoside).

[0103] Rp internucleoside linkages may also be represented as srP, and Sp internucleoside linkages may be represented as ssP herein. Using HELM annotations, a stereodefined Sp phosphorothioate internucleoside linkage may also be referred to as [ssP] or abbreviated as “S” herein (see Examples 13 and 16).

[0104] In some embodiments the stereoselectivity of each stereodefined phosphorothioate stereocenter is at least about 97%. In some embodiments the stereoselectivity of each stereodefined phosphorothioate stereocenter is at least about 98%. In some embodiments the stereoselectivity of each stereodefined phosphorothioate stereocenter is at least about 99%.

[0105] In some embodiments a stereoselective internucleoside linkage is in the same stereoisomeric form in at least 97%, such as at least 98%, such as at least 99%, or (essentially) all of the oligonucleotide molecules present in a population of the oligonucleotide molecule. Stereoselectivity can be measured in a model system only having an achiral backbone (i.e. phosphodiesters) it is possible to measure the stereoselectivity of each monomer by e.g. coupling a stereodefined monomer to the following model-system “5′ t-po-t-po-t-po 3”. The result of this will then give: 5′ DMTr-t-srp-t-po-t-po-t-po 3′ or 5′ DMTr-t-ssp-t-po-t-po-t-po 3′ which can be separated using HPLC. The stereoselectivity is determined by integrating the UV signal from the two possible compounds and giving a ratio of these e.g. 98:2, 99:1 or >99:1.

[0106] It will be understood that the stereo % purity of a specific single diastereoisomer (a single stereodefined oligonucleotide molecule) will be a function of the coupling selectivity for the defined stereocenter at each internucleoside position, and the number of stereodefined internucleoside linkages to be introduced. By way of example, if the coupling selectivity at each position is 97%, the resulting purity of the stereodefined oligonucleotide with 15 stereodefined internucleoside linkages will be 0.97¹⁵, i.e. 63% of the desired diastereoisomer as compared to 37% of the other diastereoisomers. The purity of the defined diastereoisomer may after synthesis be improved by purification, for example by HPLC, such as ion exchange chromatography or reverse phase chromatography.

[0107] In some embodiments, a stereodefined oligonucleotide refers to a population of an oligonucleotide wherein at least about 40%, such as at least about 50% of the population is of the desired diastereoisomer.

[0108] Alternatively stated, in some embodiments, a stereodefined oligonucleotide refers to a population of oligonucleotides wherein at least about 40%, such as at least about 50%, of the population consists of the desired (specific) stereodefined internucleoside linkage motif (also termed stereodefined motif).

[0109] For stereodefined oligonucleotides which comprise both stereorandom and stereodefined internucleoside stereocenters, the purity of the stereodefined oligonucleotide is determined with reference to the % of the population of the oligonucleotide which retains the defined stereodefined internucleoside linkage motif(s), the stereorandom linkages are disregarded in the calculation.

[0110] As used herein, a “stereodefined oligonucleotide” refers to an oligonucleotide wherein at least one of the internucleoside linkages is a stereodefined internucleoside linkage.

[0111] As used herein, a “stereodefined phosphorothioate oligonucleotide” refers to an oligonucleotide wherein at least one of the internucleoside linkages is a stereodefined phosphorothioate internucleoside linkage.

[0112] As used herein, the term “complementarity” describes the capacity for Watson-Crick base-pairing of nucleosides/nucleotides. Watson-Crick base pairs are guanine (G)-cytosine (C) and adenine (A)-thymine (T)/uracil (U). It will be understood that oligonucleotides may comprise nucleosides with modified nucleobases, for example 5-methyl cytosine is often used in place of cytosine, and as such the term complementarity encompasses Watson Crick base-paring between non-modified and modified nucleobases (see for example Hirao et al (2012) Accounts of Chemical Research vol 45 page 2055 and Bergstrom (2009) Current Protocols in Nucleic Acid Chemistry Suppl. 37 1.4.1).

[0113] As used herein, the term “% complementary” refers to the number of nucleotides in percent of a contiguous nucleotide sequence in a nucleic acid molecule (e.g. oligonucleotide) which, at a given position, are complementary to (i.e. form Watson Crick base pairs with) a contiguous sequence of nucleotides, at a given position of a separate nucleic acid molecule (e.g. the target nucleic acid or target sequence). The percentage is calculated by counting the number of aligned bases that form pairs between the two sequences (when aligned with the target sequence 5′-3′ and the oligonucleotide sequence from 3′-5′), dividing by the total number of nucleotides in the oligonucleotide and multiplying by 100. In such a comparison a nucleobase/nucleotide which does not align (form a base pair) is termed a mismatch. Preferably, insertions and deletions are not allowed in the calculation of % complementarity of a contiguous nucleotide sequence.

[0114] As used herein, the term “fully complementary” refers to 100% complementarity.

[0115] As used herein, the term “identity” refers to the proportion of nucleotides (expressed in percent) of a contiguous nucleotide sequence in a nucleic acid molecule (e.g. oligonucleotide) which across the contiguous nucleotide sequence, are identical to a reference sequence (e.g. a sequence motif). The percentage of identity is thus calculated by counting the number of aligned bases that are identical (a match) between two sequences (e.g. in the contiguous nucleotide sequence of the compound of the invention and in the reference sequence), dividing that number by the total number of nucleotides in the aligned region and multiplying by 100. Therefore, Percentage of Identity=(Matches×100)/Length of aligned region (e.g. the contiguous nucleotide sequence). Insertions and deletions are not allowed in the calculation the percentage of identity of a contiguous nucleotide sequence. It will be understood that in determining identity, chemical modifications of the nucleobases are disregarded as long as the functional capacity of the nucleobase to form Watson Crick base pairing is retained (e.g. 5-methyl cytosine is considered identical to a cytosine for the purpose of calculating % identity).

[0116] As used herein, the term “hybridizing” or “hybridizes” refers to two nucleic acid strands (e.g. an oligonucleotide and a target nucleic acid) forming hydrogen bonds between base pairs on opposite strands thereby forming a duplex. The affinity of the binding between two nucleic acid strands is the strength of the hybridization. It is often described in terms of the melting temperature (Tₘ) defined as the temperature at which half of the oligonucleotides are duplexed with the target nucleic acid. At physiological conditions Tₘ is not strictly proportional to the affinity (Mergny and Lacroix, 2003, Oligonucleotides 13:515-537). The standard state Gibbs free energy ΔG° is a more accurate representation of binding affinity and is related to the dissociation constant (K_{d}) of the reaction by ΔG°=−RTln(K_{d}), where R is the gas constant and T is the absolute temperature. Therefore, a very low ΔG° of the reaction between an oligonucleotide and the target nucleic acid reflects a strong hybridization between the oligonucleotide and target nucleic acid. ΔG° is the energy associated with a reaction where aqueous concentrations are 1M, the pH is 7, and the temperature is 37° C. The hybridization of oligonucleotides to a target nucleic acid is a spontaneous reaction and for spontaneous reactions ΔG° is less than zero. ΔG° can be measured experimentally, for example, by use of the isothermal titration calorimetry (ITC) method as described in Hansen et al., 1965, Chem Comm. 36-38 and Holdgate et al., 2005, Drug Discov Today. The skilled person will know that commercial equipment is available for ΔG° measurements. ΔG° can also be estimated numerically by using the nearest neighbor model as described by SantaLucia, 1998, Proc Natl Acad Sci USA. 95: 1460-1465 using appropriately derived thermodynamic parameters described by Sugimoto et al., 1995, Biochemistry 34:11211-11216 and McTigue et al., 2004, Biochemistry 43:5388-5405. In order to have the possibility of modulating its intended nucleic acid target by hybridization, oligonucleotides of the present invention hybridize to a target nucleic acid with estimated ΔG° values below −10 kcal for oligonucleotides that are 10-30 nucleotides in length. In some embodiments the degree or strength of hybridization is measured by the standard state Gibbs free energy ΔG°. The oligonucleotides may hybridize to a target nucleic acid with estimated ΔG° values below the range of −10 kcal, such as below −15 kcal, such as below −20 kcal and such as below −25 kcal for oligonucleotides that are 8-30 nucleotides in length. In some embodiments the oligonucleotides hybridize to a target nucleic acid with an estimated ΔG° value of −10 to −60 kcal, such as −12 to −40, such as from −15 to −30 kcal or −16 to −27 kcal such as −18 to −25 kcal.

[0117] As used herein, the term “target nucleic acid” refers to the nucleic acid which encodes a mammalian ATXN3 protein and may for example be a gene, a ATXN3 RNA, a mRNA, a pre-mRNA, a mature mRNA or a cDNA sequence. The target may therefore be referred to as an “ATXN3 target nucleic acid”.

[0118] In some embodiments, the target nucleic acid encodes a human ATXN3 protein, such as the human ATXN3 gene encoding the pre-mRNA sequence provided herein as SEQ ID NO:1. Thus, the target nucleic acid may be SEQ ID NO:1.

[0119] In some embodiments, the target nucleic acid encodes a mouse ATXN3 protein. Suitably, the target nucleic acid encoding a mouse ATXN3 protein comprises a sequence as shown in SEQ ID NO: 3.

[0120] In some embodiments, the target nucleic acid encodes a cynomolgus monkey ATXN3 protein. Suitably, the target nucleic acid encoding a cynomolgus monkey ATXN3 protein comprises a sequence as shown in SEQ ID NO: 2.

[0121] If employing the oligonucleotide of the invention in research or diagnostics the target nucleic acid may be a cDNA or a synthetic nucleic acid derived from DNA or RNA.

[0122] For in vivo or in vitro application, the oligonucleotide of the invention is typically capable of inhibiting the expression of the ATXN3 target nucleic acid in a cell which is expressing the ATXN3 target nucleic acid. The contiguous sequence of nucleobases of the oligonucleotide of the invention is typically complementary to the ATXN3 target nucleic acid, as measured across the length of the oligonucleotide, optionally with the exception of one or two mismatches, and optionally excluding nucleotide based linker regions which may link the oligonucleotide to an optional functional group such as a conjugate, or other non-complementary terminal nucleotides (e.g. region D′ or D″). The target nucleic acid is a messenger RNA, such as a mature mRNA or a pre-mRNA which encodes mammalian ATXN3 protein, such as human ATXN3, e.g. the human ATXN3 pre-mRNA sequence, such as that disclosed as SEQ ID NO:1, or ATXN3 mature mRNA. Further, the target nucleic acid may be a cynomolgus monkey ATXN3 pre-mRNA sequence, such as that disclosed as SEQ ID NO:1, or a cynomolgus monkey ATXN3 mature mRNA. Further, the target nucleic acid may be a mouse ATXN3 pre-mRNA sequence, such as that disclosed as SEQ ID NO:3, or mouse ATXN3 mature mRNA. SEQ ID NOS:1-3 are DNA sequences it will be understood that target RNA sequences have uracil (U) bases in place of the thymidine bases (T).

TABLE 1
Target nucleic acids

| Target Nucleic Acid | Sequence ID |
|---|---|
| ATXN3 Homo sapien spre-mRNA | SEQ ID NO: 1 |
| ATXN3 Macaca fascicularis pre-mRNA | SEQ ID NO: 2 |
| ATXN3 Mus musculus mRNA | SEQ ID NO: 3 |

[0123] In some embodiments, the oligonucleotide of the invention targets SEQ ID NO:1.

[0124] In some embodiments, the oligonucleotide of the invention targets SEQ ID NO:2.

[0125] In some embodiments, the oligonucleotide of the invention targets SEQ ID NO:3.

[0126] In some embodiments, the oligonucleotide of the invention targets SEQ ID NO:1 and SEQ ID NO:2.

[0127] In some embodiments, the oligonucleotide of the invention targets SEQ ID NO:1 and SEQ ID NO:3.

[0128] In some embodiments, the oligonucleotide of the invention targets SEQ ID NO:1, SEQ ID NO:2 and SEQ ID NO:3.

[0129] As used herein, the term “target sequence” refers to a sequence of nucleotides present in the target nucleic acid which comprises the nucleobase sequence which is complementary to the oligonucleotide of the invention. In some embodiments, the target sequence consists of a region on the target nucleic acid which is complementary to the contiguous nucleotide sequence of the oligonucleotide of the invention.

[0130] Herein are provided numerous target sequence regions, as defined by regions of the human ATXN3 pre-mRNA (using SEQ ID NO:1 as a reference) which may be targeted by the oligonucleotides of the invention.

[0131] In some embodiments the target sequence is longer than the complementary sequence of a single oligonucleotide, and may, for example represent a preferred region of the target nucleic acid which may be targeted by several oligonucleotides of the invention.

[0132] The oligonucleotide of the invention comprises a contiguous nucleotide sequence which is complementary to or hybridizes to the target nucleic acid, such as a sub-sequence of the target nucleic acid, such as a target sequence described herein.

[0133] The oligonucleotide comprises a contiguous nucleotide sequence which are complementary to a target sequence present in the target nucleic acid molecule. The contiguous nucleotide sequence (and therefore the target sequence) comprises at least 10 contiguous nucleotides, such as 9, 10, 11, 12, 13, 14, 15, 16, 17, 18, 19, 20, 21, 22, 23, 24, 25, 26, 27, 28, 29 or 30 contiguous nucleotides, such as from 12-25, such as from 14-18 contiguous nucleotides.

[0134] As used herein, the term “target sequence region” refers to an antisense oligonucleotide, 10-30 nucleotides in length, wherein said antisense oligonucleotide comprises a contiguous nucleotide sequence 10-30 nucleotides in length, wherein the contiguous nucleotide sequence is at least 90% complementary to a region of SEQ ID NO:1. The region of SEQ ID NO:1 to which the antisense oligonucleotide of the invention is complementary to is referred to as the target sequence region.

[0135] In some embodiments the target sequence region is AAGAGTAAAATATGGGT (SEQ ID NO:1093).

[0136] In some embodiments the target sequence region is GAATGTAAAAGTGTACAG (SEQ ID NO:1094).

[0137] In some embodiments the target sequence region is GGAATGTAAAAGTGTACA (SEQ ID NO:1095).

[0138] In some embodiments the target sequence region is GGGAATGTAAAAGTGTAC (SEQ ID NO:1096).

[0139] In some embodiments the target sequence region is TTGATGGTATAATGAAGAA (SEQ ID NO:1097).

[0140] In some embodiments the target sequence region is GGAAGATGTAAATAAGATT (SEQ ID NO:1098).

[0141] In some embodiments, the target sequence region is AAGATGTAAATAAGATTC (SEQ ID NO:1992).

[0142] It is to be understood that target RNA sequences have uracil (U) bases in place of any thymidine (T) bases.

[0143] As used herein, the term “off-target sequence” refers to a sequence of nucleotides comprising a nucleobase sequence which may be partially complementary to an oligonucleotide of the invention but which is present in another nucleic acid than the target (ATXN3) nucleic acid.

[0144] As used herein, the term “target cell” refers to a cell which is expressing the target nucleic acid. In some embodiments the target cell may be in vivo or in vitro. In some embodiments the target cell is a mammalian cell such as a rodent cell, such as a mouse cell or a rat cell, or a primate cell such as a monkey cell (e.g. a cynomolgus monkey cell) or a human cell.

[0145] In preferred embodiments the target cell expresses human ATXN3 mRNA, such as the ATXN3 pre-mRNA, e.g. SEQ ID NO:1, or ATXN3 mature mRNA. In some embodiments the target cell expresses monkey ATXN3 mRNA, such as the ATXN3 pre-mRNA, e.g. SEQ ID NO:2, or ATXN3 mature mRNA. In some embodiments the target cell expresses mouse ATXN3 mRNA, such as the ATXN3 pre-mRNA, e.g. SEQ ID NO:3, or ATXN3 mature mRNA. The poly A tail of ATXN3 mRNA is typically disregarded for antisense oligonucleotide targeting.

[0146] As used herein, the term “naturally occurring variant” refers to variants of ATXN3 gene or transcripts which originate from the same genetic loci as the target nucleic acid, but may differ for example, by virtue of degeneracy of the genetic code causing a multiplicity of codons encoding the same amino acid, or due to alternative splicing of pre-mRNA, or the presence of polymorphisms, such as single nucleotide polymorphisms (SNPs), and allelic variants. Based on the presence of the sufficient complementary sequence to the oligonucleotide, the oligonucleotide of the invention may therefore target the target nucleic acid and naturally occurring variants thereof.

[0147] The Homo sapiens ATXN3 gene is located at chromosome 14, 92058552..92106621, complement (NC 000014.9, Gene ID 4287).

[0148] In some embodiments, the naturally occurring variants have at least 95% such as at least 98% or at least 99% homology to a mammalian ATXN3 target nucleic acid, such as a target nucleic acid selected form the group consisting of SEQ ID NOS:1, 2 and 3. In some embodiments the naturally occurring variants have at least 99% homology to the human ATXN3 target nucleic acid of SEQ ID NO:1.

[0149] As used herein, the term “modulation of expression” refers to an overall term for an oligonucleotide's ability to alter the amount of ATXN3 protein or ATXN3 mRNA when compared to the amount of ATXN3 or ATXN3 mRNA prior to administration of the oligonucleotide. Alternatively modulation of expression may be determined by reference to a control experiment. It is generally understood that the control is an individual or target cell treated with a saline composition or an individual or target cell treated with a non-targeting oligonucleotide (mock).

[0150] One type of modulation is an oligonucleotide's ability to inhibit, down-regulate, reduce, suppress, remove, stop, block, prevent, lessen, lower, avoid or terminate expression of ATXN3, e.g. by degradation of ATXN3 mRNA.

[0151] As used herein, a “high affinity modified nucleoside” refers to a modified nucleoside which, when incorporated into the oligonucleotide enhances the affinity of the oligonucleotide for its complementary target, for example as measured by the melting temperature (Tₘ). A high affinity modified nucleoside of the present invention preferably result in an increase in melting temperature between +0.5 to +12° C., more preferably between +1.5 to +10° C. and most preferably between +3 to +8° C. per modified nucleoside. Numerous high affinity modified nucleosides are known in the art and include for example, many 2′ substituted nucleosides as well as locked nucleic acids (LNA) (see e.g. Freier & Altmann; Nucl. Acid Res., 1997, 25, 4429-4443 and Uhlmann; Curr. Opinion in Drug Development, 2000, 3(2), 293-213).

[0152] As used herein, the term “RNase H activity” refers to the ability of an antisense oligonucleotide to recruit RNase H when in a duplex with a complementary RNA molecule. WO 01/23613 provides in vitro methods for determining RNaseH activity, which may be used to determine the ability to recruit RNaseH. Typically an oligonucleotide is deemed capable of recruiting RNase H if it, when provided with a complementary target nucleic acid sequence, has an initial rate, as measured in pmol/l/min, of at least 5%, such as at least 10% or more than 20% of the of the initial rate determined when using a oligonucleotide having the same base sequence as the modified oligonucleotide being tested, but containing only DNA monomers with phosphorothioate linkages between all monomers in the oligonucleotide, and using the methodology provided by Example 91-95 of WO01/23613 (hereby incorporated by reference). For use in determining RHase H activity, recombinant human RNase H1 is available from Lubio Science GmbH, Lucerne, Switzerland.

[0153] The antisense oligonucleotide of the invention, or contiguous nucleotide sequence thereof may be a gapmer. The antisense gapmers are commonly used to inhibit a target nucleic acid via RNase H mediated degradation.

[0154] As used herein, the term “gapmer oligonucleotide” refers to an oligonucleotide that comprises at least three distinct structural regions—a 5′-flank, a gap and a 3′-flank (F-G-F′)- in the ‘5→3’ orientation. The “gap” region (G) comprises a stretch of contiguous DNA nucleotides which enable the oligonucleotide to recruit RNase H. The gap region is flanked by a 5′ flanking region (F) comprising one or more sugar modified nucleosides, advantageously high affinity sugar modified nucleosides, and by a 3′ flanking region (F′) comprising one or more sugar modified nucleosides, advantageously high affinity sugar modified nucleosides. The one or more sugar modified nucleosides in region F and F′ enhance the affinity of the oligonucleotide for the target nucleic acid (i.e. are affinity enhancing sugar modified nucleosides). In some embodiments, the one or more sugar modified nucleosides in region F and F′ are 2′ sugar modified nucleosides, such as high affinity 2′ sugar modifications, such as independently selected from LNA and 2′-MOE.

[0155] In a gapmer design, the 5′ and 3′ most nucleosides of the gap region are DNA nucleosides, and are positioned adjacent to a sugar modified nucleoside of the 5′ (F) or 3′ (F′) region respectively. The flanks may further defined by having at least one sugar modified nucleoside at the end most distant from the gap region, i.e. at the 5′ end of the 5′ flank and at the 3′ end of the 3′ flank.

[0156] Regions F-G-F′ form a contiguous nucleotide sequence. Antisense oligonucleotides of the invention, or the contiguous nucleotide sequence thereof, may comprise a gapmer region of formula F-G-F′.

[0157] The overall length of the gapmer design F-G-F′ may be, for example 12 to 32 nucleosides, such as 13 to 24, such as 14 to 22 nucleosides, Such as from 14 to 17, such as 16 to 18 nucleosides.

[0158] By way of example, the gapmer oligonucleotide of the present invention can be represented by the following formulae:

F₁₋₈-G₅₋₁₆-F′₁₋₈, such as

F₁₋₈-G₇₋₁₆-F′₂₋₈

with the proviso that the overall length of the gapmer regions F-G-F′ is at least 12, such as at least 14 nucleotides in length.

[0159] Regions F, G and F′ are further defined below and can be incorporated into the F-G-F′ formula.

[0160] As used herein, “region G (gap region)” of the gapmer refers to a region of nucleosides which enables the oligonucleotide to recruit RNaseH, such as human RNase H1, typically DNA nucleosides. RNaseH is a cellular enzyme which recognizes the duplex between DNA and RNA, and enzymatically cleaves the RNA molecule. Suitably gapmers may have a gap region (G) of at least 5 or 6 contiguous DNA nucleosides, such as 5-16 contiguous DNA nucleosides, such as 6-15 contiguous DNA nucleosides, such as 7-14 contiguous DNA nucleosides, such as 8-12 contiguous DNA nucleotides, such as 8-12 contiguous DNA nucleotides in length. The gap region G may, in some embodiments consist of 6, 7, 8, 9, 10, 11, 12, 13, 14, 15 or 16 contiguous DNA nucleosides. One or more cytosine (C) DNA in the gap region may in some instances be methylated (e.g. when a DNA c is followed by a DNA g) such residues are either annotated as 5-methyl-cytosine (^{me}C). In some embodiments the gap region G may consist of 6, 7, 8, 9, 10, 11, 12, 13, 14, 15 or 16 contiguous phosphorothioate linked DNA nucleosides. In some embodiments, all internucleoside linkages in the gap are phosphorothioate linkages. Whilst traditional gapmers have a DNA gap region, there are numerous examples of modified nucleosides which allow for RNaseH recruitment when they are used within the gap region. Modified nucleosides which have been reported as being capable of recruiting RNaseH when included within a gap region include, for example, alpha-L-LNA, C4′ alkylated DNA (as described in PCT/EP2009/050349 and Vester et al., Bioorg. Med. Chem. Lett. 18 (2008) 2296-2300, both incorporated herein by reference), arabinose derived nucleosides like ANA and 2′F-ANA (Mangos et al. 2003 J. AM. CHEM. SOC. 125, 654-661), UNA (unlocked nucleic acid) (as described in Fluiter et al., Mol. Biosyst., 2009, 10, 1039 incorporated herein by reference). UNA is unlocked nucleic acid, typically where the bond between C2 and C3 of the ribose has been removed, forming an unlocked “sugar” residue. The modified nucleosides used in such gapmers may be nucleosides which adopt a 2′ endo (DNA like) structure when introduced into the gap region, i.e. modifications which allow for RNaseH recruitment). In some embodiments the DNA Gap region (G) described herein may optionally contain 1 to 3 sugar modified nucleosides which adopt a 2′ endo (DNA like) structure when introduced into the gap region.

[0161] Alternatively, there are numerous reports of the insertion of a modified nucleoside which confers a 3′ endo conformation into the gap region of gapmers, whilst retaining some RNaseH activity. Such gapmers with a gap region comprising one or more 3′ endo modified nucleosides are referred to as “gap-breaker” or “gap-disrupted” gapmers, see for example WO2013/022984.

[0162] As used herein, the term “gap-breaker” or “gap-disrupted” refers to oligonucleotides that retain sufficient region of DNA nucleosides within the gap region to allow for RNaseH recruitment. The ability of “gap-breaker” oligonucleotide design to recruit RNaseH is typically sequence or even compound specific see Rukov et al. 2015 Nucl. Acids Res. Vol. 43 pp. 8476-8487, which discloses “gap-breaker” oligonucleotides which recruit RNaseH which in some instances provide a more specific cleavage of the target RNA. Modified nucleosides used within the gap region of gap-breaker oligonucleotides may for example be modified nucleosides which confer a 3′ endo confirmation, such 2′ O-methyl (OMe) or 2′-O-MOE (MOE) nucleosides, or beta-D LNA nucleosides (the bridge between C2′ and C4′ of the ribose sugar ring of a nucleoside is in the beta conformation), such as beta-D-oxy LNA or ScET nucleosides.

[0163] As with gapmers containing region G described above, the gap region of “gap-breaker” or “gap-disrupted” gapmers, have a DNA nucleosides at the 5′ end of the gap (adjacent to the 3′ nucleoside of region F), and a DNA nucleoside at the 3′ end of the gap (adjacent to the 5′ nucleoside of region F′). Gapmers which comprise a disrupted gap typically retain a region of at least 3 or 4 contiguous DNA nucleosides at either the 5′ end or 3′ end of the gap region.

[0164] Exemplary designs for gap-breaker oligonucleotides include:

F₁₋₈-[D₃₋₄-E₁-D₃₋₄]-F′₁₋₈

F₁₋₈-[D₁₋₄-E₁-D₃₋₄]-F′₁₋₈

F₁₋₈-[D₃₋₄-E₁-D₁₋₄]-F′₁₋₈

wherein region G is within the brackets [Dₙ-Eᵣ-Dₘ], D is a contiguous sequence of DNA nucleosides, E is a modified nucleoside (the gap-breaker or gap-disrupting nucleoside), and F and F′ are the flanking regions as defined herein, and with the proviso that the overall length of the gapmer regions F-G-F′ is at least 12, such as at least 14 nucleotides in length.

[0165] In some embodiments, region G of a gap disrupted gapmer comprises at least 6 DNA nucleosides, such as 6, 7, 8, 9, 10, 11, 12, 13, 14, 15 or 16 DNA nucleosides. As described above, the DNA nucleosides may be contiguous or may optionally be interspersed with one or more modified nucleosides, with the proviso that the gap region G is capable of mediating RNaseH recruitment.

[0166] As used herein, “region F (flanking region)” of the gapmer refers to a region of nucleosides that is positioned immediately adjacent to the 5′ DNA nucleoside of region G. The 3′ most nucleoside of region F is a sugar modified nucleoside, such as a high affinity sugar modified nucleoside, for example a 2′ substituted nucleoside, such as a MOE nucleoside, or an LNA nucleoside.

[0167] As used herein, “region F′ (flanking region)” of the gapmer refers to a region of nucleosides that is positioned immediately adjacent to the 3′ DNA nucleoside of region G. The 5′ most nucleoside of region F′ is a sugar modified nucleoside, such as a high affinity sugar modified nucleoside, for example a 2′ substituted nucleoside, such as a MOE nucleoside, or an LNA nucleoside.

[0168] Region F is 1-8 contiguous nucleotides in length, such as 2-6, such as 3-4 contiguous nucleotides in length. Advantageously the 5′ most nucleoside of region F is a sugar modified nucleoside. In some embodiments the two 5′ most nucleoside of region F are sugar modified nucleoside. In some embodiments the 5′ most nucleoside of region F is an LNA nucleoside. In some embodiments the two 5′ most nucleoside of region F are LNA nucleosides. In some embodiments the two 5′ most nucleoside of region F are 2′ substituted nucleoside nucleosides, such as two 3′ MOE nucleosides. In some embodiments the 5′ most nucleoside of region F is a 2′ substituted nucleoside, such as a MOE nucleoside.

[0169] Region F′ is 2-8 contiguous nucleotides in length, such as 3-6, such as 4-5 contiguous nucleotides in length. Advantageously, embodiments the 3′ most nucleoside of region F′ is a sugar modified nucleoside. In some embodiments the two 3′ most nucleoside of region F′ are sugar modified nucleoside. In some embodiments the two 3′ most nucleoside of region F′ are LNA nucleosides. In some embodiments the 3′ most nucleoside of region F′ is an LNA nucleoside. In some embodiments the two 3′ most nucleoside of region F′ are 2′ substituted nucleoside nucleosides, such as two 3′ MOE nucleosides. In some embodiments the 3′ most nucleoside of region F′ is a 2′ substituted nucleoside, such as a MOE nucleoside.

[0170] It should be noted that when the length of region F or F′ is one, it is advantageously an LNA nucleoside.

[0171] In some embodiments, region F and F′ independently consists of or comprises a contiguous sequence of sugar modified nucleosides. In some embodiments, the sugar modified nucleosides of region F may be independently selected from 2′-O-alkyl-RNA units, 2′-O-methyl-RNA, 2′-amino-DNA units, 2′-fluoro-DNA units, 2′-alkoxy-RNA, MOE units, LNA units, arabino nucleic acid (ANA) units and 2′-fluoro-ANA units.

[0172] In some embodiments, region F and F′ independently comprises both LNA and a 2′ substituted modified nucleosides (mixed wing design).

[0173] In some embodiments, region F and F′ consists of only one type of sugar modified nucleosides, such as only MOE or only beta-D-oxy LNA or only ScET. Such designs are also termed uniform flanks or uniform gapmer design.

[0174] In some embodiments, all the nucleosides of region F or F′, or F and F′ are LNA nucleosides, such as independently selected from beta-D-oxy LNA, ENA or ScET nucleosides.

[0175] In some embodiments, all the nucleosides of region F or F′, or F and F′ are 2′ substituted nucleosides, such as OMe or MOE nucleosides. In some embodiments region F consists of 1, 2, 3, 4, 5, 6, 7, or 8 contiguous OMe or MOE nucleosides. In some embodiments only one of the flanking regions can consist of 2′ substituted nucleosides, such as OMe or MOE nucleosides. In some embodiments it is the 5′ (F) flanking region that consists 2′ substituted nucleosides, such as OMe or MOE nucleosides whereas the 3′ (F′) flanking region comprises at least one LNA nucleoside, such as beta-D-oxy LNA nucleosides or cET nucleosides. In some embodiments it is the 3′ (F′) flanking region that consists 2′ substituted nucleosides, such as OMe or MOE nucleosides whereas the 5′ (F) flanking region comprises at least one LNA nucleoside, such as beta-D-oxy LNA nucleosides or cET nucleosides.

[0176] In some embodiments, all the modified nucleosides of region F and F′ are LNA nucleosides, such as independently selected from beta-D-oxy LNA, ENA or ScET nucleosides, wherein region F or F′, or F and F′ may optionally comprise DNA nucleosides (an alternating flank, see definition of these for more details). In some embodiments, all the modified nucleosides of region F and F′ are beta-D-oxy LNA nucleosides, wherein region F or F′, or F and F′ may optionally comprise DNA nucleosides (an alternating flank, see definition of these for more details).

[0177] In some embodiments the 5′ most and the 3′ most nucleosides of region F and F′ are LNA nucleosides, such as beta-D-oxy LNA nucleosides or ScET nucleosides.

[0178] In some embodiments, the internucleoside linkage between region F and region G is a phosphorothioate internucleoside linkage. In some embodiments, the internucleoside linkage between region F′ and region G is a phosphorothioate internucleoside linkage. In some embodiments, the internucleoside linkages between the nucleosides of region F or F′, F and F′ are phosphorothioate internucleoside linkages.

[0179] As used herein, the term “LNA gapmer” refers to a gapmer wherein either one or both of region F and F′ comprises or consists of LNA nucleosides. A beta-D-oxy gapmer is a gapmer wherein either one or both of region F and F′ comprises or consists of beta-D-oxy LNA nucleosides.

[0180] In some embodiments the LNA gapmer is of formula: [LNA]₁₋₅-[region G]-[LNA]₁₋₅, wherein region G is as defined in the Gapmer region G definition.

[0181] As used herein, the term “MOE gapmer” refers to a gapmer wherein regions F and F′ consist of MOE nucleosides. In some embodiments the MOE gapmer is of design [MOE]₁₋₈-[Region G]-[MOE]₁₋₈, such as [MOE]₂₋₇-[Region G]₅₋₁₆-[MOE]₂₋₇, such as [MOE]₃₋₆-[Region G]-[MOE]₃₋₆, wherein region G is as defined in the Gapmer definition. MOE gapmers with a 5-10-5 design (MOE-DNA-MOE) have been widely used in the art.

[0182] As used herein, the term “mixed wing gapmer” refers to an LNA gapmer wherein one or both of region F and F′ comprise a 2′ substituted nucleoside, such as a 2′ substituted nucleoside independently selected from the group consisting of 2′-O-alkyl-RNA units, 2′-O-methyl-RNA, 2′-amino-DNA units, 2′-fluoro-DNA units, 2′-alkoxy-RNA, MOE units, arabino nucleic acid (ANA) units and 2′-fluoro-ANA units, such as a MOE nucleosides. In some embodiments wherein at least one of region F and F′, or both region F and F′ comprise at least one LNA nucleoside, the remaining nucleosides of region F and F′ are independently selected from the group consisting of MOE and LNA. In some embodiments wherein at least one of region F and F′, or both region F and F′ comprise at least two LNA nucleosides, the remaining nucleosides of region F and F′ are independently selected from the group consisting of MOE and LNA. In some mixed wing embodiments, one or both of region F and F′ may further comprise one or more DNA nucleosides.

[0183] Mixed wing gapmer designs are disclosed in WO2008/049085 and WO2012/109395, both of which are hereby incorporated by reference.

[0184] As used herein, the term “Alternating Flank Gapmer” refers to LNA gapmer oligonucleotides where at least one of the flanks (F or F′) comprises DNA in addition to the LNA nucleoside(s). In some embodiments at least one of region F or F′, or both region F and F′, comprise both LNA nucleosides and DNA nucleosides. In such embodiments, the flanking region F or F′, or both F and F′ comprise at least three nucleosides, wherein the 5′ and 3′ most nucleosides of the F and/or F′ region are LNA nucleosides.

[0185] In some embodiments at least one of region F or F′, or both region F and F′, comprise both LNA nucleosides and DNA nucleosides. In such embodiments, the flanking region F or F′, or both F and F′ comprise at least three nucleosides, wherein the 5′ and 3′ most nucleosides of the F or F′ region are LNA nucleosides, and there is at least one DNA nucleoside positioned between the 5′ and 3′ most LNA nucleosides of region F or F′ (or both region F and F′).

[0186] The oligonucleotide of the invention may in some embodiments comprise or consist of the contiguous nucleotide sequence of the oligonucleotide which is complementary to the target nucleic acid, such as the gapmer F-G-F′, and further 5′ and/or 3′ nucleosides. The further 5′ and/or 3′ nucleosides may or may not be fully complementary to the target nucleic acid. Such further 5′ and/or 3′ nucleosides may be referred to as “region D′” and “region D″” herein.

[0187] The addition of “region D′” or “region D″” may be used for the purpose of joining the contiguous nucleotide sequence, such as the gapmer, to a conjugate moiety or another functional group. When used for joining the contiguous nucleotide sequence with a conjugate moiety is can serve as a biocleavable linker. Alternatively it may be used to provide exonuclease protection or for ease of synthesis or manufacture.

[0188] “Region D′” and “Region D″” can be attached to the 5′ end of region F or the 3′ end of region F′, respectively to generate designs of the following formulas D′-F-G-F′, F-G-F′-D″ or D′-F-G-F′-D″. In this instance the F-G-F′ is the gapmer portion of the oligonucleotide and region D′ or D″ constitute a separate part of the oligonucleotide.

[0189] “Region D′” or “Region D″” may independently comprise or consist of 1, 2, 3, 4 or 5 additional nucleotides, which may be complementary or non-complementary to the target nucleic acid. The nucleotide adjacent to the F or F′ region is not a sugar-modified nucleotide, such as a DNA or RNA or base modified versions of these. The D′ or D′ region may serve as a nuclease susceptible biocleavable linker (see definition of linkers). In some embodiments the additional 5′ and/or 3′ end nucleotides are linked with phosphodiester linkages, and are DNA or RNA. Nucleotide based biocleavable linkers suitable for use as region D′ or D″ are disclosed in WO2014/076195, which include by way of example a phosphodiester linked DNA dinucleotide. The use of biocleavable linkers in poly-oligonucleotide constructs is disclosed in WO2015/113922, where they are used to link multiple antisense constructs (e.g. gapmer regions) within a single oligonucleotide.

[0190] In one embodiment the oligonucleotide of the invention comprises a region D′ and/or D″ in addition to the contiguous nucleotide sequence which constitutes the gapmer.

[0191] In some embodiments, the oligonucleotide of the present invention can be represented by the following formulae:

F-G-F′; in particular F₁₋₈-G₅₋₁₆-F′₂₋₈

D′-F-G-F′, in particular D′₁₋₃-F₁₋₈-G₅₋₁₆-F′₂₋₈

F-G-F′-D″, in particular F₁₋₈-G₅₋₁₆-F′₂₋₈-D″₁₋₃

D′-F-G-F′-D″, in particular D′₁₋₃-F₁₋₈-G₅₋₁₆-F₂₋₈-D″₁₋₃

[0192] In some embodiments the internucleoside linkage positioned between region D′ and region F is a phosphodiester linkage. In some embodiments the internucleoside linkage positioned between region F′ and region D″ is a phosphodiester linkage.

[0193] As used herein, the term “conjugate” refers to an oligonucleotide which is covalently linked to a non-nucleotide moiety (conjugate moiety or region C or third region).

[0194] Conjugation of the oligonucleotide of the invention to one or more non-nucleotide moieties may improve the pharmacology of the oligonucleotide, e.g. by affecting the activity, cellular distribution, cellular uptake or stability of the oligonucleotide. In some embodiments the conjugate moiety modify or enhance the pharmacokinetic properties of the oligonucleotide by improving cellular distribution, bioavailability, metabolism, excretion, permeability, and/or cellular uptake of the oligonucleotide. In particular the conjugate may target the oligonucleotide to a specific organ, tissue or cell type and thereby enhance the effectiveness of the oligonucleotide in that organ, tissue or cell type. At the same time the conjugate may serve to reduce activity of the oligonucleotide in non-target cell types, tissues or organs, e.g. off target activity or activity in non-target cell types, tissues or organs.

[0195] In an embodiment, the non-nucleotide moiety (conjugate moiety) is selected from the group consisting of carbohydrates, cell surface receptor ligands, drug substances, hormones, lipophilic substances, polymers, proteins, peptides, toxins (e.g. bacterial toxins), vitamins, viral proteins (e.g. capsids) or combinations thereof.

[0196] As used herein, the term “linkage” or “linker” refers to a connection between two atoms that links one chemical group or segment of interest to another chemical group or segment of interest via one or more covalent bonds. Conjugate moieties can be attached to the oligonucleotide directly or through a linking moiety (e.g. linker or tether). Linkers serve to covalently connect a third region, e.g. a conjugate moiety (Region C), to a first region, e.g. an oligonucleotide or contiguous nucleotide sequence or gapmer region F-G-F′ (region A).

[0197] In some embodiments of the invention the conjugate or oligonucleotide conjugate of the invention may optionally, comprise a linker region (second region or region B and/or region Y) which is positioned between the oligonucleotide or contiguous nucleotide sequence complementary to the target nucleic acid (region A or first region) and the conjugate moiety (region C or third region).

[0198] As used herein, the term “Region B” refers to biocleavable linkers comprising or consisting of a physiologically labile bond that is cleavable under conditions normally encountered or analogous to those encountered within a mammalian body. Conditions under which physiologically labile linkers undergo chemical transformation (e.g., cleavage) include chemical conditions such as pH, temperature, oxidative or reductive conditions or agents, and salt concentration found in or analogous to those encountered in mammalian cells. Mammalian intracellular conditions also include the presence of enzymatic activity normally present in a mammalian cell such as from proteolytic enzymes or hydrolytic enzymes or nucleases. In one embodiment the biocleavable linker is susceptible to Si nuclease cleavage. DNA phosphodiester containing biocleavable linkers are described in more detail in WO 2014/076195 (hereby incorporated by reference) see also region D′ or D″ herein.

[0199] As used herein, the term “Region Y” refers to linkers that are not necessarily biocleavable but primarily serve to covalently connect a conjugate moiety (region C or third region), to an oligonucleotide (region A or first region). The region Y linkers may comprise a chain structure or an oligomer of repeating units such as ethylene glycol, amino acid units or amino alkyl groups. The oligonucleotide conjugates of the present invention can be constructed of the following regional elements A-C, A-B-C, A-B—Y—C, A-Y—B—C or A-Y-C. In some embodiments the linker (region Y) is an amino alkyl, such as a C2 to C36 amino alkyl group, including, for example C6 to C12 amino alkyl groups. In a preferred embodiment the linker (region Y) is a C6 amino alkyl group.

### II. Oligonucleotides for Inhibiting ATXN3

[0200] The invention relates to oligonucleotides, such as antisense oligonucleotides, targeting ATXN3 expression.

[0201] The oligonucleotides of the invention targeting ATXN3 are capable of hybridizing to and inhibiting the expression of a ATXN3 target nucleic acid in a cell which is expressing the ATXN3 target nucleic acid.

[0202] The ATXN3 target nucleic acid may be a mammalian ATXN3 mRNA or premRNA, such as a human, mouse or monkey ATXN3 mRNA or premRNA. In some embodiments, the ATXN3 target nucleic acid is ATXN3 mRNA or premRNA for example a premRNA or mRNA originating from the Homo sapiens Ataxin 3 (ATXN3), RefSeqGene on chromosome 14, exemplified by NCBI Reference Sequence NM 004993.5 (SEQ ID NO:1).

[0203] The human ATXN3 pre-mRNA is encoded on Homo sapiens Chromosome 14, NC 000014.9 (92058552..92106621, complement). GENE ID=4287 (ATXN3).

[0204] The oligonucleotides of the invention are capable of inhibiting the expression of ATXN3 target nucleic acid, such as the ATXN3 mRNA, in a cell which is expressing the target nucleic acid, such as the ATXN3 mRNA (e.g. a human, monkey or mouse cell).

[0205] In some embodiments, the oligonucleotides of the invention are capable of inhibiting the expression of ATXN3 target nucleic acid in a cell which is expressing the target nucleic acid, so to reduce the level of ATXN3 target nucleic acid (e.g. the mRNA) by at least 50%, at least 60%, at least 70%, at least 80%, or at least 90% inhibition compared to the expression level of the ATXN3 target nucleic acid (e.g. the mRNA) in the cell. Suitably the cell is selected from the group consisting of a human cell, a monkey cell and a mouse cell. In some embodiments, the cell is a SK-N-AS, A431, NCI-H23 or ARPE19 cell (for more information on these cells, see Examples). Example 1 provides a suitable assay for evaluating the ability of the oligonucleotides of the invention to inhibit the expression of the target nucleic acid. Suitably the evaluation of a compounds ability to inhibit the expression of the target nucleic acid is performed in vitro, such a gymnotic in vitro assay, for example as according to Example 1.

[0206] In some embodiments, an oligonucleotide of the invention is more capable in inhibiting the expression of ATXN3 target nucleic acid in a cell which is expressing the target nucleic acid than in inhibiting the expression of KCNB2 nucleic acid in a cell which is expressing the KCNB2 nucleic acid, providing for a higher selectivity in targeting the ATXN3 target nucleic acid. KCNB2 (Potassium Voltage-Gated Channel Subfamily B Member 2) nucleic acid was identified as containing a potential off-target sequence which may be annealed to certain oligonucleotides targeting SEQ ID NO:1098 and/or SEQ ID NO:1992. Information, including sequence information, about the KCNB2 gene and transcripts can be found in the public database Ensembl (release 101) at gene id ENSG00000182674.

[0207] Suitably, the capability of an oligonucleotide to inhibit the expression of ATXN3 and KCNB2 nucleic acids is tested in a cell expressing both nucleic acids. In some embodiments, an oligonucleotide of the invention is capable of inhibiting the expression of ATXN3 target nucleic acid so as to reduce the level of ATXN3 target nucleic acid (e.g. the mRNA) by a fraction which is at least 50%, at least 60%, at least 70%, at least 80%, or at least 90% inhibition compared to the expression level of the ATXN3 target nucleic acid (e.g. the mRNA) in the cell, but reduces the level of KCNB2 off-target nucleic acid (e.g., the mRNA) as compared to the expression level of the KCNB2 target nucleic acid (e.g. the mRNA) in the cell by a smaller fraction. The cell, may, for example, be selected from the group consisting of a human cell, a monkey cell and a mouse cell. In some embodiments, the cell is a neuronal cell, such as an iCell® Glutaneuron cell (for more information on these cells, see Table 2). Examples 5 and 14 provides suitable assays for evaluating the ability of the oligonucleotides of the invention to inhibit the expression of the target nucleic acid as compared to the off-target nucleic acid. Suitably the evaluation of the ability of an oligonucleotide to inhibit the expression of the target nucleic acid and the off-target nucleic acid is performed in vitro, such a gymnotic in vitro assay, for example as according to Example 14.

[0208] Advantageously, an oligonucleotide according to the invention has a low EC50 in inhibiting the expression of ATXN3 target nucleic acid in a cell which is expressing the target nucleic acid, providing for a high efficacy and/or potency in targeting the ATXN3 target nucleic acid. In some embodiments, the EC50 for inhibiting the expression of ATXN3 target nucleic acid is no more than about 1 μM, such as no more than about 500 nM, such as no more than about 300 nM, such as no more than about 200 nM, such as no more than about 180 nM, such as no more than about 170 nM, such as no more than about 160 nM, such as no more than about 150 nM, such as no more than about 140 nM, such as no more than about 130 nM, such as no more than about 120 nM, such as no more than about 110 nM, such as no more than about 100 nM, such as no more than about 90 nM, such as no more than about 80 nM, such as no more than about 70 nM, such as no more than about 60 nM, such as no more than about 50 nM. The cell, may, for example, be selected from the group consisting of a human cell, a monkey cell and a mouse cell. In some embodiments, the cell is a neuronal cell, such as a human neuronal cell, such as an iCell® GlutaNeuron cell (for more information on these cells, see Table 2). A particularly suitable assay is described in Example 16.

[0209] Preferably, an oligonucleotide according to the invention also or alternatively has a lower EC50 for inhibiting the expression of ATXN3 target nucleic acid (e.g., mRNA) in a cell than for inhibiting the expression of KCNB2 off-target nucleic acid (e.g., mRNA) in the cell, indicating that 50% inhibition of the expression of the nucleic acid is, for ATXN3 target nucleic acid, achieved at a lower oligonucleotide concentration, thereby providing for a higher selectivity. In some embodiments, the ratio between the EC50 for inhibiting the expression of KCNB2 off-target nucleic acid (e.g., mRNA) and the EC50 for inhibiting the expression of ATXN3 target nucleic acid is at least about 2, such as at least about 2.1, such as at least about 2.2, such as at least about 2.5, such as at least about 3, such as at least about 4, such as at least about 5, such as at least about 6, such as at least about 7, such as at least about 8, such as at least about 9, such as at least about 10, such as at least about 12, such as at least about 15, such as at least about 20, such as at least about 50, such as at least about 100, such as at least about 200, such as at least about 400, such as at least about 600, such as at least about 1000. The cell, may, for example, be selected from the group consisting of a human cell, a monkey cell and a mouse cell. In some embodiments, the cell is a neuronal cell, such as a human neuronal cell, such as an iCell® GlutaNeuron cell (for more information on these cells, see Table 2). Particularly suitable assays are described in Examples 14 and 16.

[0210] Typically, an oligonucleotide according to the invention also or alternatively has a low toxicity. Suitably, this can be tested in an in vitro assay, such as, e.g., in any one or more of the assays described in Example 7.

[0211] An aspect of the present invention relates to an antisense oligonucleotide, such as an LNA antisense oligonucleotide gapmer which comprises a contiguous nucleotide sequence of 10 to 30 nucleotides in length with at least 90% complementarity, such as is fully complementary to SEQ ID NO:1, 2 or 3.

[0212] In some embodiments, the oligonucleotide comprises a contiguous sequence of 10-30 nucleotides, which is at least 90% complementary, such as at least 91%, such as at least 92%, such as at least 93%, such as at least 94%, such as at least 95%, such as at least 96%, such as at least 97%, such as at least 98%, or 100% complementary with a region of the target nucleic acid or a target sequence. The sequences of suitable target nucleic acids are described herein above.

[0213] In some embodiments, the oligonucleotide of the invention comprises a contiguous nucleotides sequence of 12-24, such as 13, 14, 15, 16, 17, 18, 19, 20, 21, 22, or 23, contiguous nucleotides in length, wherein the contiguous nucleotide sequence is fully complementary to a target nucleic acid having a sequence as provided in the section “Taget sequence regions” above.

[0214] In some embodiments, the antisense oligonucleotide of the invention comprises a contiguous nucleotides sequence of 12-15, such as 13, or 14, 15 contiguous nucleotides in length, wherein the contiguous nucleotide sequence is fully complementary to a target nucleic acid having a sequence as provided in the section “Target sequence regions” above.

[0215] Typically, the antisense oligonucleotide of the invention or the contiguous nucleotide sequence thereof is a gapmer, such as an LNA gapmer, a mixed wing gapmer, or an alternating flank gapmer.

[0216] In some embodiments, the antisense oligonucleotide according to the invention, comprises a contiguous nucleotide sequence of at least 10 contiguous nucleotides, such as at least 12 contiguous nucleotides, such as at least 13 contiguous nucleotides, such as at least 14 contiguous nucleotides, such as at least 15 contiguous nucleotides, which is fully complementary to a target sequence comprised in a sequence selected from SEQ ID NO:1098, SEQ ID NO:1992, or both.

[0217] In some embodiments, the target sequence region of an antisense oligonucleotide according to the invention comprises or consists of SEQ ID NO:1098.

[0218] In some embodiments, the target sequence region of an antisense oligonucleotide according to the invention comprises or consists of SEQ ID NO:1992.

[0219] In some embodiments the contiguous nucleotide sequence of the antisense oligonucleotide according to the invention is less than 20 nucleotides in length. In some embodiments the contiguous nucleotide sequence of the antisense oligonucleotide according to the invention is 12-24 nucleotides in length. In some embodiments the contiguous nucleotide sequence of the antisense oligonucleotide according to the invention is 12-22 nucleotides in length. In some embodiments the contiguous nucleotide sequence of the antisense oligonucleotide according to the invention is 12-20 nucleotides in length. In some embodiments the contiguous nucleotide sequence of the antisense oligonucleotide according to the invention is 12-18 nucleotides in length. In some embodiments the contiguous nucleotide sequence of the antisense oligonucleotide according to the invention is 12-16 nucleotides in length.

[0220] Advantageously, in some embodiments all of the internucleoside linkages between the nucleosides of the contiguous nucleotide sequence are phosphorothioate internucleoside linkages.

[0221] In some embodiments, the contiguous nucleotide sequence is fully complementary to a target nucleic acid.

[0222] The oligonucleotide compounds represent specific designs of a motif sequence. Typically, capital letters or the HELM-designation [LR] represent beta-D-oxy LNA nucleosides, lowercase letters or [dR] represent DNA nucleosides, all LNA C are 5-methyl cytosine, and 5-methyl DNA cytosines are presented by “e” or mc or [5meC], and all internucleoside linkages are, unless otherwise indicated, stereoundefined phosphorothioate internucleoside linkages [sP].

[0223] Design refers to the gapmer design, F-G-F′, where each number represents the number of consecutive modified nucleosides, e.g. 2′ modified nucleosides (first number=5′ flank), followed by the number of DNA nucleosides (second number=gap region), followed by the number of modified nucleosides, e.g. 2′ modified nucleosides (third number=3′ flank), optionally preceded by or followed by further repeated regions of DNA and LNA, which are not necessarily part of the contiguous nucleotide sequence that is complementary to the target nucleic acid.

[0224] Motif sequences represent the contiguous sequence of nucleobases present in the oligonucleotide, also referred to as the Oligonucleotide Base Sequence.

[0225] Typically, the antisense oligonucleotides is 12-24, such as 12-18, nucleosides in length wherein the antisense oligonucleotide comprises a contiguous nucleotide sequence comprising at least 12, such as at least 14, such as at least 15 contiguous nucleotides present in a sequence selected from SEQ ID NO:1122 and SEQ ID NO:1816, with one or more of the further modifications described herein.

[0226] In some embodiments, the antisense oligonucleotide is a gapmer oligonucleotide comprising a contiguous nucleotide sequence of formula 5′-F-G-F′-3′, where region F and F′ independently comprise 1-8 sugar modified nucleosides, and G is a region between 5 and 16 nucleosides which are capable of recruiting RNaseH.

[0227] In some embodiments, the sugar-modified nucleosides of region F and F′ are independently selected from the group consisting of 2′-O-alkyl-RNA, 2′-O-methyl-RNA, 2′-O-alkoxy-RNA, 2′-O-methoxyethyl-RNA, 2′-amino-DNA, 2′-fluoro-DNA, arabino nucleic acid (ANA), 2′-fluoro-ANA and LNA nucleosides.

[0228] In some embodiments, region G comprises 5-16 contiguous DNA nucleosides.

[0229] In some embodiments, the antisense oligonucleotide is an LNA gapmer oligonucleotide comprising LNA nucleosides.

[0230] In some embodiments, the LNA nucleosides are beta-D-oxy LNA nucleosides.

[0231] In some embodiments, substantially all, or all of the internucleoside linkages between the contiguous nucleosides are phosphorothioate internucleoside linkages.

[0232] In some embodiments, substantially all, or all phosphorothioate internucleoside linkages between the contiguous nucleosides are stereo-undefined phosphorothioate internucleoside linkages.

[0233] In some embodiments, one or more internucleoside linkages between the contiguous nucleosides are stereodefined phosphorothioate internucleoside linkages.

[0234] Particular sequence motifs and antisense oligonucleotides of the present invention are shown in Table 11 of Example 13, wherein each compound represents a separate specific embodiment according to the invention.

[0235] In some embodiments, the antisense oligonucleotide comprises a contiguous nucleotide sequence comprising the base sequence of an antisense oligonucleotide selected from the group consisting of Compound ID Nos. 1122_82 to 1122_336, shown in Table 11.

[0236] In some embodiments, the antisense oligonucleotide comprises or consists of an antisense oligonucleotide selected from the group consisting of Compound ID Nos. 1122_82 to 1122_336, shown in Table 11.

[0237] In some embodiments, the antisense oligonucleotide comprises a contiguous nucleotide sequence comprising the nucleoside base sequence and, optionally, the sugar moiety modifications, of an antisense oligonucleotide selected from the group consisting of Compound ID Nos. 1122_91, 1122_107, 1122_154, 1122_155, 1122_156, 1122_157, 1122_158, 1122_167, 1122_172, 1122_175, 1122_294, and 1122_296, shown in Table 14.

[0238] In one aspect, the antisense oligonucleotide is an LNA gapmer antisense oligonucleotide comprising a contiguous nucleotide sequence comprising the contiguous nucleotides present in SEQ ID NO:1122 except for the modified nucleosides and modified intemucleoside linkages indicated in Table 15 for each residue in SEQ ID NO:1122. In a specific embodiment, the antisense oligonucleotide is more capable of inhibiting the expression of human ATXN3 than human KCNB2 in a cell which is expressing human ATXN3 and human KCNB2.

[0239] In one embodiment, the LNA gapmer antisense oligonucleotide comprises the contiguous nucleotides present in SEQ ID NO:1122, wherein all internucleoside linkages are stereo-undefined phosphorothioate internucleoside linkages, wherein 2, 3 or 4 of the nucleosides in each of region F and region F′ are beta-D-oxy LNA nucleosides [LR], typically wherein each beta-D-oxy LNA cytosine is 5-methyl cytosine [LR](5meC), except for:
[0240] (a) residue 10 being a 2′-O-methyl uracil nucleoside [mR](U) (e.g., Compound ID No. 1122_91);
[0241] (b) residue 3 being a 2′-O-methyl uracil nucleoside [mR](U) (e.g., Compound ID No. 1122_107);
[0242] (c) the intemucleoside linkage between residues 11 and 12 being a stereodefined phosphorothioate internucleoside linkage [ssP] (e.g., Compound ID No. 1122_154);
[0243] (d) the intemucleoside linkage between residues 12 and 13 being a stereodefined phosphorothioate internucleoside linkage [ssP] (e.g., Compound ID No. 1122_155);
[0244] (e) the intemucleoside linkage between residues 13 and 14 being a stereodefined phosphorothioate internucleoside linkage [ssP] (e.g., Compound ID No. 1122_156);
[0245] (f) the intemucleoside linkage between residues 14 and 15 being a stereodefined phosphorothioate internucleoside linkage [ssP] (e.g., Compound ID No. 1122_157);
[0246] (g) the intemucleoside linkage between residues 15 and 16 being a stereodefined phosphorothioate internucleoside linkage [ssP] (e.g., Compound ID No. 1122_158);
[0247] (h) residue 7 being a 2′-O-methoxyethyl adenine nucleoside [MOE](A) (e.g., Compound ID No. 1122_167);
[0248] (i) residue 15 being a 2′-O-methyl cytosine nucleoside [mR](C) (e.g., Compound ID NO. 1122_172);
[0249] (j) residue 11 being a 2′-O-methyl adenine nucleoside [mR](A) (e.g., Compound ID No. 1122_175);
[0250] (k) residue 18 being a 2′-fluoro cytosine nucleoside [fR](C) (e.g., Compound ID No. 1122_294);
[0251] (l) residue 4 being a 2′-O-methyl cytosine nucleoside [mR](C) (e.g., Compound ID No. 1122_296); or
[0252] (m) a combination of any two or more of (a) to (l).

[0253] In some embodiments, the one or more modified nucleosides and/or one or more modified intemucleoside linkages are, for each residue in SEQ ID NO:1122, independently selected from the options for that residue as shown in Table 15.

[0254] In one aspect, the antisense oligonucleotide is an LNA gapmer antisense oligonucleotide comprising a contiguous nucleotide sequence comprising the contiguous nucleotides present in SEQ ID NO:1816 except for the modified nucleosides and modified internucleoside linkages indicated in Table 16 for each residue in SEQ ID NO:1816. In a specific embodiment, the antisense oligonucleotide is more capable of inhibiting the expression of human ATXN3 than human KCNB2 in a cell which is expressing human ATXN3 and human KCNB2.

[0255] In one embodiment, the LNA gapmer antisense oligonucleotide comprises the contiguous nucleotides present in SEQ ID NO:1816, wherein all internucleoside linkages are stereo-undefined phosphorothioate internucleoside linkages, wherein 4, 5 or 6 of the nucleosides in the F-region and 2 or 3 of the nucleosides in the F′-region are beta-D-oxy LNA nucleosides [LR], typically wherein each beta-D-oxy LNA cytosine is 5-methyl cytosine [LR](5meC), except for:
[0256] (a) the internucleoside linkage between residues 12 and 13 being a stereodefined phosphorothioate internucleoside linkage [ssP] (e.g., Compound ID No. 1816_13);
[0257] (b) the internucleoside linkage between residues 14 and 15 being a stereodefined phosphorothioate internucleoside linkage [ssP] (e.g., Compound ID No. 1816_15);
[0258] (c) residue 8 being a 2′-fluoro adenine nucleoside [fR](A) (e.g., Compound ID No. 1816_28);
[0259] (d) residues 1, 2, 3, 5, 7, 8, 16, 17 and 18 being LNA beta-D-oxy LNA nucleosides [LR], wherein each beta-D-oxy LNA cytosine is 5-methyl cytosine [LR](5meC) (e.g, Compound ID No. 1816_41);
[0260] (e) residue 17 being a 2′-O-methoxyethyl thymine nucleoside [MOE](T) (e.g., Compound ID No. 1816_42);
[0261] (0 residue 16 being a 2′-O-methoxyethyl cytosine nucleoside [MOE](5meC) (e.g., Compound ID No. 1816_43);
[0262] (g) residue 8 being a 2′-O-methyl adenine nucleoside [mR](A) (e.g., Compound ID No. 1816_60);
[0263] (h) residue 3 being a 2′-O-methyl adenine nucleoside [mR](A) (e.g., Compound ID No. 1816_61);
[0264] (i) residue 16 being a 2′-O-fluoro cytosine nucleoside [fR](C) (e.g., Compound ID No. 1816_64);
[0265] (j) residue 16 being a 2′-O-methyl cytosine nucleoside [mR](C) (e.g., Compound ID No. 1816_65);
[0266] (k) residue 17 being a 2′-fluoro uracil nucleoside [fR](U) (e.g., Compound ID No. 1816_68); or
[0267] (l) a combination of any two or more of (a) to (k).

[0268] In some embodiments, the one or more modified nucleosides and/or one or more modified internucleoside linkages are, for each residue in SEQ ID NO:1816, independently selected from the options for that residue as shown in Table 16.

[0269] In some embodiments, the antisense oligonucleotide comprises or consists of Compound ID No. 1122_91, as shown in Table 11.

[0270] In some embodiments, the antisense oligonucleotide comprises or consists of Compound ID No. 1122_107, as shown in Table 11.

[0271] In some embodiments, the antisense oligonucleotide comprises or consists of Compound ID No. 1122_154, as shown in Table 11.

[0272] In some embodiments, the antisense oligonucleotide comprises or consists of Compound ID No. 1122_155, as shown in Table 11.

[0273] In some embodiments, the antisense oligonucleotide comprises or consists of Compound ID No. 1122_156, as shown in Table 11.

[0274] In some embodiments, the antisense oligonucleotide comprises or consists of Compound ID No. 1122_157, as shown in Table 11.

[0275] In some embodiments, the antisense oligonucleotide comprises or consists of Compound ID No. 1122_158, as shown in Table 11.

[0276] In some embodiments, the antisense oligonucleotide comprises or consists of Compound ID No. 1122_167, as shown in Table 11.

[0277] In some embodiments, the antisense oligonucleotide comprises or consists of Compound ID No. 1122_172, as shown in Table 11.

[0278] In some embodiments, the antisense oligonucleotide comprises or consists of Compound ID No. 1122_175, as shown in Table 11.

[0279] In some embodiments, the antisense oligonucleotide comprises or consists of Compound ID No. 1122_294, as shown in Table 11.

[0280] In some embodiments, the antisense oligonucleotide comprises or consists of Compound ID No. 1122_296, as shown in Table 11.

[0281] In some embodiments, the antisense oligonucleotide comprises or consists of Compound ID No. 1816_13, as shown in Table 11.

[0282] In some embodiments, the antisense oligonucleotide comprises or consists of Compound ID No. 1816_15, as shown in Table 11.

[0283] In some embodiments, the antisense oligonucleotide comprises or consists of Compound ID No. 1816_28, as shown in Table 11.

[0284] In some embodiments, the antisense oligonucleotide comprises or consists of Compound ID No. 1816_41, as shown in Table 11.

[0285] In some embodiments, the antisense oligonucleotide comprises or consists of Compound ID No. 1816_42, as shown in Table 11.

[0286] In some embodiments, the antisense oligonucleotide comprises or consists of Compound ID No. 1816_43, as shown in Table 11.

[0287] In some embodiments, the antisense oligonucleotide comprises or consists of Compound ID No. 1816_60, as shown in Table 11.

[0288] In some embodiments, the antisense oligonucleotide comprises or consists of Compound ID No. 1816_61, as shown in Table 11.

[0289] In some embodiments, the antisense oligonucleotide comprises or consists of Compound ID No. 1816_64, as shown in Table 11.

[0290] In some embodiments, the antisense oligonucleotide comprises or consists of Compound ID No. 1816_65, as shown in Table 11.

[0291] In some embodiments, the antisense oligonucleotide comprises or consists of Compound ID No. 1816_68, as shown in Table 11.

[0292] In some embodiments, the antisense oligonucleotide is an antisense oligonucleotide according to the following chemical annotation:
[0293] (a) ^{[LR]}A_{[sP]}.^{[dR]}A_{[sP]}.^{[dR]}T_{[sP]}.^{[LR][5me]}C_{[sP]}.^{[dR]}T_{[sP]}.^{[LR]}T_{[sP]}.^{[dR]}A_{[sp]}.^{[dR]}T_{[sP]}.^{[dR]}T_{[sP]}.^{[m R]}U_{[sP]}.^{[dR]}(A)_{[sP]}.^{[dR]}C_{[sP]}.^{[dR]}A_{[sP]}.^{[dR]}T_{[sP]}.^{[dR]}C_{[sP]}.^{[dR]}T_{[sP]}.^{[LR]}T_{[sP]}.^{[LR][5me]}C)_{[sP]}.^{[LR][5me]}C (SEQ ID NO:1122, wherein residue 10 is U) (Compound ID No. 1122_91);
[0294] (b) ^{[LR]}A_{[sP]}.^{[LR]}A_{[sP]}.^{[mR]}U_{[sP]}.^{[LR][5me]}C_{[sP]}.^{[dR]}T_{[sP]}.^{[dR]}T_{[sP]}.^{[dR]}A_{[sp]}.^{[dR]}T_{[sP]}.^{[dR]}T_{[sP]}.^{[d R]}T_{[sP]}.^{[dR]}A_{[sP]}.^{[dR]}C_{[sP]}.^{[dR]}A_{[sP]}.^{[dR]}T_{[sP]}.^{[dR]}C_{[sP]}.^{[LR]}T_{[sP]}.^{[dR]}T_{[sP]}.^{[LR][5me]}C_{[sP]}.^{[LR][5me]}C (SEQ ID NO:1122, wherein residue 3 is U) (Compound ID No. 1122_107);
[0295] (c) ^{[LR]}A_{[sP]}.^{[dR]}A_{[sP]}.^{[dR]}T_{[sP]}.^{[LR][5me]}C_{[sP]}.^{[dR]}T_{[sP]}.^{[LR]}T_{[sP]}.^{[dR]}A_{[sp]}.^{[dR]}T_{[sP]}.^{[dR]}T_{[sP]}.^{[d R]}T_{[sP]}.^{[dR]}A_{[ssP]}.^{[dR]}C_{[sP]}.^{[dR]}A_{[sP]}.^{[dR]}T_{[sP]}.^{[dR]}C_{[sP]}.^{[dR]}T_{[sP]}.^{[LR]}T_{[sP]}.^{[LR][5me]}C_{[sP]}.^{[LR][5me]}C (SEQ ID NO:1122) (Compound ID No. 1122_154);
[0296] (d) ^{[LR]}A_{[sP]}.^{[dR]}A_{[sP]}.^{[dR]}T_{[sP]}.^{[LR][5me]}C_{[sP]}.^{[dR]}T_{[sP]}.^{[LR]}T_{[sP]}.^{[dR]}A_{[sp]}.^{[dR]}T_{[sP]}.^{[dR]}T_{[sP]}.^{[d R]}T_{[sP]}.^{[dR]}A_{[sP]}.^{[dR]}C_{[ssP]}.^{[dR]}A_{[sP]}.^{[dR]}T_{[sP]}.^{[dR]}C_{[sP]}.^{[dR]}T_{[sP]}.^{[LR]}T_{[sP]}.^{[LR][5me]}C_{[sP]}.^{[LR][5me]}C (SEQ ID NO:1122) (Compound ID No. 1122_155);
[0297] (e) ^{[LR]}A_{[sP]}.^{[dR]}A_{[sP]}.^{[dR]}T_{[sP]}.^{[LR]}[5meC]_{[sP]}.^{[dR]}T_{[sP]}.^{[LR]}T_{[sP]}.^{[dR]}A_{[sp]}.^{[dR]}T_{[sP]}.^{[dR]}T_{[sP]}.^{[dR]}T_{[sP]}.^{[dR]}A_{[sP]}.^{[dR]}C_{[ssP]}.^{[dR]}A_{[ssP]}.^{[dR]}T_{[sP]}.^{[dR]}C_{[sP]}.^{[dR]}T_{[sP]}.^{[LR]}T_{[sP]}.^{[LR][5me]}C_{[sP]}.^{[LR][5me]}C (SEQ ID NO:1122) (Compound ID No. 1122_156);
[0298] (f) ^{[LR]}A_{[sP]}.^{[dR]}A_{[sP]}.^{[dR]}T_{[sP]}.^{[LR]}[5meC]_{[sP]}.^{[dR]}T_{[sP]}.^{[LR]}T_{[sP]}.^{[dR]}A_{[sp]}.^{[dR]}T_{[sP]}.^{[dR]}T_{[sP]}.^{[dR]}T_{[sP]}.^{[dR]}A_{[sP]}.^{[dR]}C_{[ssP]}.^{[dR]}A_{[sP]}.^{[dR]}T_{[ssP]}.^{[dR]}C_{[sP]}.^{[dR]}T_{[sP]}.^{[LR]}T_{[sP]}.^{[LR][5me]}C_{[sP]}.^{[LR][5me]}C (SEQ ID NO:1122) (Compound ID No. 1122_157);
[0299] (g) ^{[LR]}A_{[sP]}.^{[dR]}A_{[sP]}.^{[dR]}T_{[sP]}.^{[LR][5me]}C_{[sP]}.^{[dR]}T_{[sP]}.^{[LR]}T_{[sP]}.^{[dR]}A_{[sp]}.^{[dR]}T_{[sP]}.^{[dR]}T_{[sP]}.^{[d R]}T_{[sP]}.^{[dR]}A_{[sP]}.^{[dR]}C_{[sP]}.^{[dR]}A_{[sP]}.^{[dR]}T_{[sP]}.^{[dR]}C_{[ssP]}.^{[dR]}T_{[sP]}.^{[LR]}T_{[sP]}.^{[LR][5me]}C_{[sP]}.^{[LR][5me]}C (SEQ ID NO:1122) (Compound ID No. 1122_158);
[0300] (h) ^{[LR]}A_{[sP]}.^{[dR]}A_{[sP]}.^{[dR]}T_{[sP]}.^{[LR][5me]}C_{[sP]}.^{[dR]}T_{[sP]}.^{[LR]}T_{[sP]}.^{[MOE]}A_{[sp]}.^{[dR]}T_{[sP]}.^{[dR]}T_{[sP]}.^{[dR]}T_{[sP]}.^{[dR]}A_{[sP]}.^{[dR]}C_{[sP]}.^{[dR]}A_{[sP]}.^{[dR]}T_{[sP]}.^{[dR]}C_{[sP]}.^{[dR]}T_{[sP]}.^{[LR]}T_{[sP]}.^{[LR][5me]}C_{[sP]}.^{[LR][5me]}C (SEQ ID NO:1122) (Compound ID No. 1122_167);
[0301] (i) ^{[LR]}A_{[sP]}.^{[dR]}A_{[sP]}.^{[dR]}T_{[sP]}.^{[LR]}[5meC]_{[sP]}.^{[dR]}T_{[sP]}.^{[LR]}T_{[sP]}.^{[dR]}A_{[sp]}.^{[dR]}T_{[sP]}.^{[dR]}T_{[sP]}.^{[dR]}T_{[sP]}.^{[dR]}A_{[sP]}.^{[dR]}C_{[ssP]}.^{[dR]}A_{[sP]}.^{[dR]}T_{[sP]}.^{[mR]}C_{[sP]}.^{[dR]}T_{[sP]}.^{[LR]}T_{[sP]}.^{[LR][5me]}C_{[sP]}.^{[LR][5me]}C (SEQ ID NO:1122) (Compound ID No. 1122_172);
[0302] (j) ^{[LR]}A_{[sP]}.^{[dR]}A_{[sP]}.^{[dR]}T_{[sP]}.^{[LR][5me]}C_{[sP]}.^{[dR]}T_{[sP]}.^{[LR]}T_{[sP]}.^{[dR]}A_{[sp]}.^{[dR]}T_{[sP]}.^{[dR]}T_{[sP]}.^{[dR]}T_{[sP]}.^{[dR]}A_{[sP]}.^{[dR]}C_{[sP]}.^{[dR]}A_{[sP]}.^{[dR]}T_{[sP]}.^{[dR]}C_{[sP]}.^{[dR]}T_{[sP]}.^{[LR]}T_{[sP]}.^{[LR][5me]}C_{[sP]}.^{[LR][5me]}C (SEQ ID NO:1122) (Compound ID No. 1122_175);
[0303] (k) ^{[LR]}A_{[sP]}.^{[dR]}A_{[sP]}.^{[dR]}T_{[sP]}.^{[LR][5me]}C_{[sP]}.^{[dR]}T_{[sP]}.^{[LR]}T_{[sP]}.^{[dR]}A_{[sp]}.^{[dR]}T_{[sP]}.^{[dR]}T_{[sP]}.^{[dR]}T_{[sP]}.^{[dR]}A_{[sP]}.^{[dR]}C_{[sP]}.^{[dR]}A_{[sP]}.^{[dR]}T_{[sP]}.^{[dR]}C_{[sP]}.^{[dR]}T_{[sP]}.^{[LR]}T_{[sP]}.^{[fR]}C_{[sP]}.^{[LR][5me]}C (SEQ ID NO:1122) (Compound ID No. 1122_294);
[0304] (l) ^{[LR]}A_{[sP]}.^{[dR]}A_{[sP]}.^{[dR]}T_{[sP]}.^{[mR]}C_{[sP]}.^{[dR]}T_{[sP]}.^{[LR]}T_{[sP]}.^{[dR]}A_{[sp]}.^{[dR]}T_{[sP]}.^{[dR]}T_{[sP]}.^{[dR]}T_{[s P]}.^{[dR]}A_{[sP]}.^{[dR]}C_{[sP]}.^{[dR]}A_{[sP]}.^{[dR]}T_{[sP]}.^{[dR]}C_{[sP]}.^{[dR]}T_{[sP]}.^{[LR]}T_{[sP]}.^{[LR][5me]}C_{[sP]}.^{[LR][5me]}C (SEQ ID NO:1122) (Compound ID No. 1122_296);
[0305] (m) ^{[LR]}G_{[sP]}.^{[LR]}A_{[sP]}.^{[dR]}A_{[sP]}.^{[dR]}T_{[sP]}.^{[LR][5me]}C_{[sP]}.^{[dR]}T_{[sP]}.^{[LR]}T_{[sP]}.^{[LR]}A_{[sP]}.^{[dR]}T_{[sP]}.^{[dR]}T_{[sP]}.^{[dR]}T_{[sP]}.^{[dR]}A_{[ssP]}.^{[dR]}C_{[sP]}.^{[dR]}A_{[sP]}.^{[dR]}T_{[sP]}.^{[LR][5me]}C_{[sP]}.^{[LR]}T_{[sP]}.^{[LR]}T (SEQ ID NO:1816) (Compound ID No. 1816_13);
[0306] (n) ^{[LR]}G_{[sP]}.^{[LR]}A_{[sP]}.^{[dR]}A_{[sP]}.^{[dR]}T_{[sP]}.^{[LR][5me]}C_{[sP]}.^{[dR]}T_{[sP]}.^{[LR]}T_{[sP]}.^{[LR]}A_{[sP]}.^{[dR]}T_{[sP]}.^{[dR]}T_{[sP]}.^{[dR]}T_{[sP]}.^{[dR]}A_{[sP]}.^{[dR]}C_{[sP]}.^{[dR]}A_{[ssP]}.^{[dR]}T_{[sP]}.^{[LR][5me]}C_{[sP]}.^{[LR]}T_{[sP]}.^{[LR]}T (SEQ ID NO:1816) (Compound ID No. 1816_15);
[0307] (o) ^{[LR]}G_{[sP]}.^{[LR]}A_{[sP]}.^{[dR]}A_{[sP]}.^{[dR]}T_{[sP]}.^{[LR][5me]}C_{[sP]}.^{[dR]}T_{[sP]}.^{[LR]}T_{[sP]}.^{[fR]}A_{[sP]}.^{[dR]}T_{[sP]}.^{[dR]}T_{[sP]}.^{[dR]}T_{[sP]}.^{[dR]}A_{[sP]}.^{[dR]}C_{[sP]}.^{[dR]}A_{[sP]}.^{[dR]}T_{[sP]}.^{[LR][5me]}C_{[sP]}.^{[LR]}T_{[sP]}.^{[LR]}T (SEQ ID NO:1816) (Compound ID No. 1816_28);
[0308] (p) ^{[LR]}G_{[sP]}.^{[LR]}A_{[sP]}.^{[dR]}A_{[sP]}.^{[dR]}T_{[sP]}.^{[LR][5me]}C_{[sP]}.^{[dR]}T_{[sP]}.^{[LR]}T_{[sP]}.^{[LR]}A_{[sP]}.^{[dR]}T_{[sP]}.^{[dR]}T_{[sP]}.^{[dR]}T_{[sP]}.^{[dR]}A_{[sP]}.^{[dR]}C_{[sP]}.^{[dR]}A_{[sP]}.^{[dR]}T_{[sP]}.^{[LR][5me]}C_{[sP]}.^{[LR]}T_{[sP]}.^{[LR]}T (SEQ ID NO:1816) (Compound ID No. 1816_41);
[0309] (q) ^{[LR]}G_{[sP]}.^{[LR]}A_{[sP]}.^{[dR]}A_{[sP]}.^{[dR]}T_{[sP]}.^{[LR][5me]}C_{[sP]}.^{[dR]}T_{[sP]}.^{[LR]}T_{[sP]}.^{[LR]}A_{[sP]}.^{[dR]}T_{[sP]}.^{[dR]}T_{[sP]}.^{[dR]}T_{[sP]}.^{[dR]}A_{[sP]}.^{[dR]}C_{[sP]}.^{[dR]}A_{[sP]}.^{[dR]}T_{[sP]}.^{[LR][5me]}C_{[sP]}.^{[MOE]}T_{[sP]}.^{[LR]}T (SEQ ID NO:1816) (Compound ID No. 1816_42);
[0310] (r) ^{[LR]}G_{[sP]}.^{[LR]}A_{[sP]}.^{[dR]}A_{[sP]}.^{[dR]}T_{[sP]}.^{[LR][5me]}C_{[sP]}.^{[dR]}T_{[sP]}.^{[LR]}T_{[sP]}.^{[LR]}A_{[sP]}.^{[dR]}T_{[sP]}.^{[dR]}T_{[sP]}.^{[dR]}T_{[sP]}.^{[dR]}A_{[sP]}.^{[dR]}C_{[sP]}.^{[dR]}A_{[sP]}.^{[dR]}T_{[sP]}.^{[MOE][5me]}C_{[sP]}.^{[LR]}T_{[sP]}.^{[LR]}T (SEQ ID NO:1816) (Compound ID No. 1816_43);
[0311] (s) ^{[LR]}G_{[sP]}.^{[LR]}A_{[sP]}.^{[dR]}A_{[sP]}.^{[dR]}T_{[sP]}.^{[LR][5me]}C_{[sP]}.^{[dR]}T_{[sP]}.^{[LR]}T_{[sP]}.^{[mR]}A_{[sP]}.^{[dR]}T_{[sP]}.^{[dR]}T_{[sP]}.^{[dR]}T_{[sP]}.^{[dR]}A_{[sP]}.^{[dR]}C_{[sP]}.^{[dR]}A_{[sP]}.^{[dR]}T_{[sP]}.^{[LR][5me]}C_{[sP]}.^{[LR]}T_{[sP]}.^{[LR]}T (SEQ ID NO:1816) (Compound ID No. 1816_60);
[0312] (t) ^{[LR]}G_{[sP]}.^{[LR]}A_{[sP]}.^{[mR]}A_{[sP]}.^{[dR]}T_{[sP]}.^{[LR][5me]}C_{[sP]}.^{[dR]}T_{[sP]}.^{[LR]}T_{[sP]}.^{[LR]}A_{[sP]}.^{[dR]}T_{[sP]}.^{[dR]}T_{[sP]}.^{[dR]}T_{[sP]}.^{[dR]}A_{[sP]}.^{[dR]}C_{[sP]}.^{[dR]}A_{[sP]}.^{[dR]}T_{[sP]}.^{[LR][5me]}C_{[sP]}.^{[LR]}T_{[sP]}.^{[LR]}T (SEQ ID NO:1816) (Compound ID No. 1816_61);
[0313] (u) ^{[LR]}G_{[sP]}.^{[LR]}A_{[sP]}.^{[dR]}A_{[sP]}.^{[dR]}T_{[sP]}.^{[LR][5me]}C_{[sP]}.^{[dR]}T_{[sP]}.^{[LR]}T_{[sP]}.^{[LR]}A_{[sP]}.^{[dR]}T_{[sP]}.^{[dR]}T_{[sP]}.^{[dR]}T_{[sP]}.^{[dR]}A_{[sP]}.^{[dR]}C_{[sP]}.^{[dR]}A_{[sP]}.^{[dR]}T_{[sP]}.^{[fR]}C_{[sP]}.^{[LR]}T_{[sP]}.^{[LR]}T (SEQ ID NO:1816) (Compound ID No. 1816_64);
[0314] (v) ^{[LR]}G_{[sP]}.^{[LR]}A_{[sP]}.^{[dR]}A_{[sP]}.^{[dR]}T_{[sP]}.^{[LR][5me]}C_{[sP]}.^{[dR]}T_{[sP]}.^{[LR]}T_{[sP]}.^{[LR]}A_{[sP]}.^{[dR]}T_{[sP]}.^{[dR]}T_{[sP]}.^{[dR]}T_{[sP]}.^{[dR]}A_{[sP]}.^{[dR]}C_{[sP]}.^{[dR]}A_{[sP]}.^{[dR]}T_{[sP]}.^{[mR]}C_{[sP]}.^{[LR]}T_{[sP]}.^{[LR]}T (SEQ ID NO:1816) (Compound ID No. 1816_65); or
[0315] (w) ^{[LR]}G_{[sP]}.^{[LR]}A_{[sP]}.^{[dR]}A_{[sP]}.^{[dR]}T_{[sP]}.^{[LR][5me]}C_{[sP]}.^{[dR]}T_{[sP]}.^{[LR]}T_{[sP]}.^{[LR]}A_{[sP]}.^{[dR]}T_{[sP]}.^{[dR]}T_{[sP]}.^{[dR]}T_{[sP]}.^{[dR]}A_{[sP]}.^{[dR]}C_{[sP]}.^{[dR]}A_{[sP]}.^{[dR]}T_{[sP]}.^{[LR][5me]}C_{[sP]}.^{[fR]}U_{[sP]}.^{[LR]}T (SEQ ID NO:1816, wherein residue 17 is U)(Compound ID No. 1816_68),
[0316] or is a pharmaceutically acceptable salt thereof, wherein
[0317] [LR] is a beta-D-oxy-LNA nucleoside,
[0318] [LR][5me]C is a beta-D-oxy-LNA 5-methyl cytosine nucleoside,
[0319] [dR] is a DNA nucleoside,
[0320] [sP] is a phosphorothioate internucleoside linkage (stereo undefined)
[0321] [ssP] is a stereodefined Sp phosphorothioate internucleoside linkage
[0322] [mR] is a 2′-O-methyl nucleoside,
[0323] [MOE] is a 2′-O-methoxyethyl nucleoside, and
[0324] [fR] is a 2′-fluoro nucleoside.

[0325] In one embodiment, the antisense oligonucleotide is the antisense oligonucleotide shown in FIG. 12A (Compound ID No. 1122_91); or a pharmaceutically acceptable salt thereof.

[0326] In one embodiment, the antisense oligonucleotide is the antisense oligonucleotide shown in FIG. 12B (Compound ID No. 1122_107); or a pharmaceutically acceptable salt thereof.

[0327] In one embodiment, the antisense oligonucleotide is the antisense oligonucleotide shown in FIG. 12C (Compound ID No. 1122_154); or a pharmaceutically acceptable salt thereof.

[0328] In one embodiment, the antisense oligonucleotide is the antisense oligonucleotide shown in FIG. 12D (Compound ID No. 1122_155); or a pharmaceutically acceptable salt thereof.

[0329] In one embodiment, the antisense oligonucleotide is the antisense oligonucleotide shown in FIG. 12E (Compound ID No. 1122_156); or a pharmaceutically acceptable salt thereof.

[0330] In one embodiment, the antisense oligonucleotide is the antisense oligonucleotide shown in FIG. 12F (Compound ID No. 1122_157); or a pharmaceutically acceptable salt thereof.

[0331] In one embodiment, the antisense oligonucleotide is the antisense oligonucleotide shown in FIG. 12G (Compound ID No. 1122_158); or a pharmaceutically acceptable salt thereof.

[0332] In one embodiment, the antisense oligonucleotide is the antisense oligonucleotide shown in FIG. 12H (Compound ID No. 1122_167); or a pharmaceutically acceptable salt thereof.

[0333] In one embodiment, the antisense oligonucleotide is the antisense oligonucleotide shown in FIG. 12I (Compound ID No. 1122_172); or a pharmaceutically acceptable salt thereof.

[0334] In one embodiment, the antisense oligonucleotide is the antisense oligonucleotide shown in FIG. 12J (Compound ID No. 1122_175); or a pharmaceutically acceptable salt thereof.

[0335] In one embodiment, the antisense oligonucleotide is the antisense oligonucleotide shown in FIG. 12K (Compound ID No. 1122_294); or a pharmaceutically acceptable salt thereof.

[0336] In one embodiment, the antisense oligonucleotide is the antisense oligonucleotide shown in FIG. 12L (Compound ID No. 1122_296); or a pharmaceutically acceptable salt thereof.

[0337] In one embodiment, the antisense oligonucleotide is the antisense oligonucleotide shown in FIG. 12M (Compound ID No. 1816_13); or a pharmaceutically acceptable salt thereof.

[0338] In one embodiment, the antisense oligonucleotide is the antisense oligonucleotide shown in FIG. 12N (Compound ID No. 1816_15); or a pharmaceutically acceptable salt thereof.

[0339] In one embodiment, the antisense oligonucleotide is the antisense oligonucleotide shown in FIG. 12O (Compound ID No. 1816_28); or a pharmaceutically acceptable salt thereof.

[0340] In one embodiment, the antisense oligonucleotide is the antisense oligonucleotide shown in FIG. 12P (Compound ID No. 1816_41); or a pharmaceutically acceptable salt thereof.

[0341] In one embodiment, the antisense oligonucleotide is the antisense oligonucleotide shown in FIG. 12Q (Compound ID No. 1816_42); or a pharmaceutically acceptable salt thereof.

[0342] In one embodiment, the antisense oligonucleotide is the antisense oligonucleotide shown in FIG. 12R (Compound ID No. 1816_43); or a pharmaceutically acceptable salt thereof.

[0343] In one embodiment, the antisense oligonucleotide is the antisense oligonucleotide shown in FIG. 12S (Compound ID No. 1816_60); or a pharmaceutically acceptable salt thereof.

[0344] In one embodiment, the antisense oligonucleotide is the antisense oligonucleotide shown in FIG. 12T (Compound ID No. 1816_61); or a pharmaceutically acceptable salt thereof.

[0345] In one embodiment, the antisense oligonucleotide is the antisense oligonucleotide shown in FIG. 12U (Compound ID No. 1816_64); or a pharmaceutically acceptable salt thereof.

[0346] In one embodiment, the antisense oligonucleotide is the antisense oligonucleotide shown in FIG. 12V (Compound ID No. 1816_65); or a pharmaceutically acceptable salt thereof.

[0347] In one embodiment, the antisense oligonucleotide is the antisense oligonucleotide shown in FIG. 12W (Compound ID No. 1816_68); or a pharmaceutically acceptable salt thereof.

### III. Compositions, Methods, and Applications for Inhibition of ATXN3 Expression

[0348] A. Method of Manufacture

[0349] In a further aspect, the invention provides methods for manufacturing the oligonucleotides of the invention comprising reacting nucleotide units and thereby forming covalently linked contiguous nucleotide units comprised in the oligonucleotide. Preferably, the method uses phophoramidite chemistry (see for example Caruthers et al, 1987, Methods in Enzymology vol. 154, pages 287-313). In a further embodiment the method further comprises reacting the contiguous nucleotide sequence with a conjugating moiety (ligand) to covalently attach the conjugate moiety to the oligonucleotide. In a further aspect a method is provided for manufacturing the composition of the invention, comprising mixing the oligonucleotide or conjugated oligonucleotide of the invention with a pharmaceutically acceptable diluent, solvent, carrier, salt and/or adjuvant.

[0350] B. Pharmaceutical Composition

[0351] In a further aspect, the invention provides pharmaceutical compositions comprising any of the aforementioned oligonucleotides and/or oligonucleotide conjugates or salts thereof and a pharmaceutically acceptable diluent, carrier, salt and/or adjuvant.

[0352] In a further aspect, the invention provides pharmaceutical compositions comprising any of the aforementioned oligonucleotides and/or oligonucleotide conjugates or salts thereof and a pharmaceutically acceptable diluent, carrier, salt or adjuvant.

[0353] A pharmaceutically acceptable diluent includes phosphate-buffered saline (PBS) and pharmaceutically acceptable salts include, but are not limited to, sodium and potassium salts. In some embodiments the pharmaceutically acceptable diluent is sterile phosphate buffered saline. In some embodiments the oligonucleotide is used in the pharmaceutically acceptable diluent at a concentration of 50-300 μM solution.

[0354] The compounds according to the present invention may exist in the form of their pharmaceutically acceptable salts. The term “pharmaceutically acceptable salt” refers to conventional acid-addition salts or base-addition salts that retain the biological effectiveness and properties of the compounds of the present invention and are formed from suitable non-toxic organic or inorganic acids or organic or inorganic bases. Acid-addition salts include for example those derived from inorganic acids such as hydrochloric acid, hydrobromic acid, hydroiodic acid, sulfuric acid, sulfamic acid, phosphoric acid and nitric acid, and those derived from organic acids such as p-toluenesulfonic acid, salicylic acid, methanesulfonic acid, oxalic acid, succinic acid, citric acid, malic acid, lactic acid, fumaric acid, and the like. Base-addition salts include those derived from ammonium, potassium, sodium and, quaternary ammonium hydroxides, such as for example, tetramethyl ammonium hydroxide. The chemical modification of a pharmaceutical compound into a salt is a technique well known to pharmaceutical chemists in order to obtain improved physical and chemical stability, hygroscopicity, flowability and solubility of compounds. It is for example described in Bastin, Organic Process Research & Development 2000, 4, 427-435 or in Ansel, In: Pharmaceutical Dosage Forms and Drug Delivery Systems, 6th ed. (1995), pp. 196 and 1456-1457. For example, the pharmaceutically acceptable salt of the compounds provided herein may be a sodium salt.

[0355] Suitable formulations for use in the present invention are found in Remington's Pharmaceutical Sciences, Mack Publishing Company, Philadelphia, Pa., 17th ed., 1985. For a brief review of methods for drug delivery, see, e.g., Langer (Science 249:1527-1533, 1990). WO 2007/031091 provides further suitable and preferred examples of pharmaceutically acceptable diluents, carriers and adjuvants (hereby incorporated by reference). Suitable dosages, formulations, administration routes, compositions, dosage forms, combinations with other therapeutic agents, pro-drug formulations are also provided in WO2007/031091.

[0356] Oligonucleotides or oligonucleotide conjugates of the invention may be mixed with pharmaceutically acceptable active or inert substances for the preparation of pharmaceutical compositions or formulations. Compositions and methods for the formulation of pharmaceutical compositions are dependent upon a number of criteria, including, but not limited to, route of administration, extent of disease, or dose to be administered.

[0357] These compositions may be sterilized by conventional sterilization techniques, or may be sterile filtered. The resulting aqueous solutions may be packaged for use as is, or lyophilized, the lyophilized preparation being combined with a sterile aqueous carrier prior to administration. The pH of the preparations typically will be between 3 and 11, more preferably between 5 and 9 or between 6 and 8, and most preferably between 7 and 8, such as 7 to 7.5. The resulting compositions in solid form may be packaged in multiple single dose units, each containing a fixed amount of the above-mentioned agent or agents, such as in a sealed package of tablets or capsules. The composition in solid form can also be packaged in a container for a flexible quantity, such as in a squeezable tube designed for a topically applicable cream or ointment.

[0358] In some embodiments, the oligonucleotide or oligonucleotide conjugate of the invention is a prodrug. In particular with respect to oligonucleotide conjugates the conjugate moiety is cleaved of the oligonucleotide once the prodrug is delivered to the site of action, e.g. the target cell.

[0359] C. Applications

[0360] The oligonucleotides of the invention may be utilized as research reagents for, for example, diagnostics, therapeutics and prophylaxis.

[0361] In research, such oligonucleotides may be used to specifically modulate the synthesis of ATXN3 protein in cells (e.g. in vitro cell cultures) and experimental animals thereby facilitating functional analysis of the target or an appraisal of its usefulness as a target for therapeutic intervention. Typically the target modulation is achieved by degrading or inhibiting the mRNA producing the protein, thereby prevent protein formation or by degrading or inhibiting a modulator of the gene or mRNA producing the protein.

[0362] If employing the oligonucleotide of the invention in research or diagnostics the target nucleic acid may be a cDNA or a synthetic nucleic acid derived from DNA or RNA.

[0363] The present invention provides an in vivo or in vitro method for modulating ATXN3 expression in a target cell which is expressing ATXN3, said method comprising administering an oligonucleotide of the invention in an effective amount to said cell.

[0364] In some embodiments, the target cell, is a mammalian cell in particular a human cell. The target cell may be an in vitro cell culture or an in vivo cell forming part of a tissue in a mammal.

[0365] In diagnostics the oligonucleotides may be used to detect and quantitate ATXN3 expression in cell and tissues by northern blotting, in-situ hybridisation or similar techniques.

[0366] For therapeutics, an animal or a human, suspected of having a disease or disorder, which can be treated by modulating the expression of ATXN3

[0367] The invention provides methods for treating or preventing a disease, comprising administering a therapeutically or prophylactically effective amount of an oligonucleotide, an oligonucleotide conjugate or a pharmaceutical composition of the invention to a subject suffering from or susceptible to the disease.

[0368] The invention also relates to an oligonucleotide, a composition or a conjugate as defined herein for use as a medicament.

[0369] The oligonucleotide, oligonucleotide conjugate or a pharmaceutical composition according to the invention is typically administered in an effective amount.

[0370] The invention also provides for the use of the oligonucleotide or oligonucleotide conjugate of the invention as described for the manufacture of a medicament for the treatment of a disorder as referred to herein, or for a method of the treatment of as a disorder as referred to herein.

[0371] The disease or disorder, as referred to herein, is associated with expression of ATXN3. In some embodiments disease or disorder may be associated with a mutation in the ATXN3 gene. Therefore, in some embodiments, the target nucleic acid is a mutated form of the ATXN3 sequence.

[0372] The methods of the invention are preferably employed for treatment or prophylaxis against diseases caused by abnormal levels and/or activity of ATXN3.

[0373] The invention further relates to use of an oligonucleotide, oligonucleotide conjugate or a pharmaceutical composition as defined herein for the manufacture of a medicament for the treatment of abnormal levels and/or activity of ATXN3.

[0374] In one embodiment, the invention relates to oligonucleotides, oligonucleotide conjugates or pharmaceutical compositions for use in the treatment of spinocerebellar ataxia.

[0375] D. Administration

[0376] In some embodiments, the oligonucleotides or pharmaceutical compositions of the present invention may be administered oral. In further embodiments, the oligonucleotides or pharmaceutical compositions of the present invention may be administered topical or enteral or parenteral (such as, intravenous, subcutaneous, intra-muscular, intracerebral, intracerebroventricular or intrathecal).

[0377] In a preferred embodiment the oligonucleotide or pharmaceutical compositions of the present invention are administered by a parenteral route including intravenous, intraarterial, subcutaneous, intraperitoneal or intramuscular injection or infusion, intrathecal or intracranial, e.g. intracerebral or intraventricular, intravitreal administration. In one embodiment the active oligonucleotide or oligonucleotide conjugate is administered intravenously. In another embodiment the active oligonucleotide or oligonucleotide conjugate is administered subcutaneously.

[0378] In some embodiments, the oligonucleotide, oligonucleotide conjugate or pharmaceutical composition of the invention is administered at a dose of 0.1-15 mg/kg, such as from 0.2-10 mg/kg, such as from 0.25-5 mg/kg. The administration can be once a week, every 2^{nd} week, every third week or even once a month.

[0379] E. Combination therapies

[0380] In some embodiments the oligonucleotide, oligonucleotide conjugate or pharmaceutical composition of the invention is for use in a combination treatment with another therapeutic agent. The therapeutic agent can for example be the standard of care for the diseases or disorders described above.

### EXAMPLES

### Materials and Methods:

[0381] Oligonucleotide Synthesis:

[0382] Oligonucleotide synthesis is generally known in the art. Below is a protocol which may be applied. The oligonucleotides of the present invention may have been produced by slightly varying methods in terms of apparatus, support and concentrations used.

[0383] Oligonucleotides are synthesized on uridine universal supports using the phosphoramidite approach on an MermMade 192 oligonucleotide synthesizer at 1 μmol scale. At the end of the synthesis, the oligonucleotides are cleaved from the solid support using aqueous ammonia for 5-16 hours at 60° C. The oligonucleotides are purified by reverse phase HPLC (RP-HPLC) or by solid phase extractions and characterized by UPLC, and the molecular mass is further confirmed by ESI-MS.

[0384] Elongation of The Oligonucleotide:

[0385] The coupling of 5′DMTr protected nucleoside O-cyanoethyl-phosphoramidites, including DNA-A(Bz), DNA-G(iBu), DNA-C(Bz), DNA-T, LNA-5-methyl-C(Bz), LNA-A(Bz), LNA-G(dmf), LNA-T, MOE-A(Bz), MOE-G(iBu), MOE-(T), MOE-(U), MOE-5-methyl-C(Bz), 2′F-A(Bz), 2′F(T), 2′F(U), 2′F—C(Ac), 2′F-G(iBu), 2′ OMe-A(Bz), 2′ OMe(U), 2′ OMe(T), 2′ OMe-C(Ac), 2′ OMe-G(iBu), 2′OMe-G(dmf) is performed by using a solution of 0.1 M of the 5′-O-DMT-protected amidite in acetonitrile and DCI (4,5-dicyanoimidazole) in acetonitrile (0.25 M) as activator.

[0386] Purification by RP-HPLC:

[0387] The crude compounds are purified by preparative RP-HPLC on a Phenomenex Jupiter C18 10μ 150×10 mm column. 0.1 M ammonium acetate pH 8 and acetonitrile is used as buffers at a flow rate of 5 mL/min. The collected fractions are lyophilized to give the purified compound typically as a white solid.

[0388] Abbreviations:
[0389] DCI: 4,5-Dicyanoimidazole
[0390] DCM: Dichloromethane
[0391] DMF: Dimethylformamidine
[0392] DMT: 4,4′-Dimethoxytrityl
[0393] THF: Tetrahydrofurane
[0394] Bz: Benzoyl
[0395] Ibu: Isobutyryl
[0396] RP-HPLC: Reverse phase high performance liquid chromatography

[0397] Tₘ Assay:

[0398] Oligonucleotide and RNA target (phosphate linked, PO) duplexes are diluted to 3 mM in 500 ml RNase-free water and mixed with 500 ml 2×Tₘ-buffer (200 mM NaCl, 0.2 mM EDTA, 20 mM Naphosphate, pH 7.0). The solution is heated to 95° C. for 3 min and then allowed to anneal in room temperature for 30 min. The duplex melting temperatures (Tₘ) is measured on a Lambda 40 UV/VIS Spectrophotometer equipped with a Peltier temperature programmer PTP6 using PE Templab software (Perkin Elmer). The temperature is ramped up from 20° C. to 95° C. and then down to 25° C., recording absorption at 260 nm. First derivative and the local maximums of both the melting and annealing are used to assess the duplex Tₘ.

[0399] Cell Lines:

TABLE 2
Details in relation to the cell lines for assaying the compounds:

| | | | | | Hours of | |
|---|---|---|---|---|---|---|
| | | | | Cells/well | cell incubation | |
| Cell lines | | | | (96 well | prior to | Days of |
| Name | Vendor | Cat. no. | Cell medium | plate) | treatment | treatment |
| A431 | ECACC | 85090402 | EMEM (Cat. no. | 8000 | 24 | 3 |
| | | | M2279), 10% FBS | | | |
| | | | (Cat. no. F7524), | | | |
| | | | 2 mM Glutamine | | | |
| | | | (Cat. no. G8541), | | | |
| | | | 0.1 mM NEAA | | | |
| | | | (Cat. no. M7145), | | | |
| | | | 25 μg/ml Gentamicin | | | |
| | | | (Cat. no. G1397) | | | |
| NCI-H23 | ATCC | CRL-5800 | RPMI 1640 | 10000 | 24 | 3 |
| | | | (Cat. no. R2405), | | | |
| | | | 10% FBS (Cat. no. | | | |
| | | | F7524), 10 mM | | | |
| | | | Hepes (Cat. no. | | | |
| | | | H0887), 1 mM | | | |
| | | | Sodium Pyruvate | | | |
| | | | (Cat. no. S8636), | | | |
| | | | 25 μg/ml Gentamicin | | | |
| | | | (Cat. no. G1397) | | | |
| ARPE19 | ATCC | CRL-2302 | DMEM/F-12 HAM | 2000 | 0 | 4 |
| | | | (Cat. no. D8437), | | | |
| | | | 10% FBS (Cat. no. | | | |
| | | | F7524), 25 μg/ml | | | |
| | | | Gentamicin | | | |
| | | | (Cat. no. G1397) | | | |
| U251 | ECACC | 9063001 | EMEM (Cat. no. | 2000 | 0 | 4 |
| | | | M2279), 10% FBS | | | |
| | | | (Cat. no. F7524), | | | |
| | | | 2 mM Glutamine | | | |
| | | | (Cat. no. G8541), | | | |
| | | | 0.1 mM NEAA | | | |
| | | | (Cat. no. M7145), | | | |
| | | | 1 mM Sodium Pyruvate | | | |
| | | | (Cat. no. S8636), | | | |
| | | | 25 μg/ml Gentamicin | | | |
| | | | (Cat. no. G1397) | | | |
| U2-OS | ATCC | HTB-96 | MCCoy 5A medium | 7000 | 24 | 3 |
| | | | (Cat. no. M8403), | | | |
| | | | 10% FBS (Cat. no. | | | |
| | | | F7524), 1.5 mM | | | |
| | | | Glutamine (Cat. no. | | | |
| | | | G8541), 25 μg/ml | | | |
| | | | Gentamicin | | | |
| | | | (Cat. no. G1397) | | | |
| SK-N-AS | ATCC | CRL-2137 | Dulbecco's Modified | 9300 | 24 | 4 |
| | | | Eagle's Medium, | | | |
| | | | supplemented with | | | |
| | | | 0.1 mM Non-Essential | | | |
| | | | Amino Acids (NEAA) | | | |
| | | | and fetal bovine | | | |
| | | | serum to a final | | | |
| | | | concentration of 10% | | | |
| iCell ® | Stemcell | R1034 | BrainPhys Neuronal | 50.000-80.000 | 168 | 4 |
| GlutaNeurons | Technologies | | Medium (Cat. no. | | | |
| | | | 5790) supplemented | | | |
| | | | with iCell ® | | | |
| | | | GlutaNeurons Kit | | | |
| | | | (Stemcell Technologies. | | | |
| | | | no. R1034) according | | | |
| | | | to vendor), N-2 | | | |
| | | | (Thermo Fisher), | | | |
| | | | 1 μg/ml Laminin 512 | | | |
| | | | (BioLamina, no. LN521) | | | |

* All medium and additives are purchased from Sigma Aldrich unless otherweise stated.

### Example 1: Testing in vitro efficacy of LNA oligonucleotides in SK-N-AS, A431, NCI-H23 and ARPE19 cell lines at 25 and 5 μM

### Materials and Methods:

[0400] An oligonucleotide screen is performed in human cell lines using the LNA oligonucleotides in Table 3 (CMP ID NO: 4_1-1089_1, see column “oligonucleotide compounds”) targeting SEQ ID NO: 1. The human cell lines SK-N-AS, A341, NCI-H23 and ARPE19 are purchased from the vendors listed in Table 2, and are maintained as recommended by the supplier in a humidified incubator at 37° C. with 5% CO₂. For the screening assays, cells are seeded in 96 multi well plates in media recommended by the supplier (see Table 2 in the Materials and Methods section). The number of cells/well is optimized for each cell line (see Table 2 in the Materials and Methods section).

[0401] Cells are incubated between 0 and 24 hours before addition of the oligonucleotide in a concentration of 5 or 25 μM (dissolved in PBS). 3-4 days after addition of the oligonucleotide, the cells are harvested (The incubation times for each cell line are indicated in Table 2 in the Materials and Methods section).

[0402] RNA is extracted using the Qiagen RNeasy 96 kit (74182), according to the manufacturer's instructions). cDNA synthesis and qPCR is performed using qScript XLT one-step RT-qPCR ToughMix Low ROX, 95134-100 (Quanta Biosciences). Target transcript levels are quantified using FAM labeled TaqMan assays from Thermo Fisher Scientific in a multiplex reaction with a VIC labelled GUSB control. TaqMan primer assays for the target transcript of interest ATXN3 (see below) and a house keeping gene GUSB (4326320E VIC-MGB probe).

ATXN3 primer assay
(Assay ID: N/A Item Name Hs.PT.58.39355049):
Forward primer:
(SEQ ID NO: 1128)
GTTTCTAAAGACATGGTCACAGC
Reverse:
(SEQ ID NO: 1129)
CTATCAGGACAGAGTTCACATCC
Probe:
(SEQ ID NO: 1130)
56-FAM/AAAGGCCAG/ZEN/CCACCAGTTCAGG/3IABkFQ/

### Results:

[0403] The relative ATXN3 mRNA expression levels are determined as % of control (PBS-treated cells) i.e. the lower the value the larger the inhibition.

TABLE 3
Sequence Motifs and Compounds of Exemplary Compounds of the Invention

| | | | | | | Oligonucleotide |
|---|---|---|---|---|---|---|
| SEQ ID NO | motif sequence | start | end | design | CMP ID NO | compound |
| 4 | aagaaaccaaaccc | 743 | 756 | 2-10-2 | 4_1 | AAgaaaccaaacCC |
| 5 | aaagaaaccaaacc | 744 | 757 | 2-10-2 | 5_1 | AAagaaaccaaaCC |
| 6 | aaaagaaaccaaac | 745 | 758 | 2-10-2 | 6_1 | AAaagaaaccaaAC |
| 7 | caaaagaaaccaaa | 746 | 759 | 2-10-2 | 7_1 | CAaaagaaaccaAA |
| 8 | ccaaaagaaaccaa | 747 | 760 | 2-10-2 | 8_1 | CCaaaagaaaccAA |
| 9 | tccactcctaatac | 803 | 816 | 2-10-2 | 9_1 | TCcactcctaatAC |
| 10 | gtccactcctaata | 804 | 817 | 2-10-2 | 10_1 | GTccactcctaaTA |
| 11 | agtccactcctaat | 805 | 818 | 2-10-2 | 11_1 | AGtccactcctaAT |
| 12 | cagtccactcctaa | 806 | 819 | 2-10-2 | 12_1 | CAgtccactcctAA |
| 13 | ccagtccactccta | 807 | 820 | 2-10-2 | 13_1 | CCagtccactccTA |
| 14 | actctttccaaaca | 1012 | 1025 | 2-10-2 | 14_1 | ACtctttccaaaCA |
| 15 | aactctttccaaac | 1013 | 1026 | 2-10-2 | 15_1 | AActctttccaaAC |
| 16 | caactctttccaaa | 1014 | 1027 | 2-10-2 | 16_1 | CAactctttccaAA |
| 17 | gcaactctttccaa | 1015 | 1028 | 2-10-2 | 17_1 | GCaactctttccAA |
| 18 | agcaactctttcca | 1016 | 1029 | 2-10-2 | 18_1 | AGcaactctttcCA |
| 19 | cagcaactctttcc | 1017 | 1030 | 2-10-2 | 19_1 | CAgcaactctttCC |
| 20 | ccagcaactctttc | 1018 | 1031 | 2-10-2 | 20_1 | CCagcaactcttTC |
| 21 | accagcaactcttt | 1019 | 1032 | 2-10-2 | 21_1 | ACcagcaactctTT |
| 22 | ctcctattaaataa | 1040 | 1053 | 2-10-2 | 22_1 | CTcctattaaatAA |
| 23 | cctcctattaaata | 1041 | 1054 | 2-10-2 | 23_1 | CCtcctattaaaTA |
| 24 | tcctcctattaaat | 1042 | 1055 | 2-10-2 | 24_1 | TCctcctattaaAT |
| 25 | ctcctcctattaaa | 1043 | 1056 | 2-10-2 | 25_1 | CTcctcctattaAA |
| 26 | gctcctcctattaa | 1044 | 1057 | 2-10-2 | 26_1 | GCtcctcctattAA |
| 27 | tgctcctcctatta | 1045 | 1058 | 2-10-2 | 27_1 | TGctcctcctatTA |
| 28 | ttgctcctcctatt | 1046 | 1059 | 2-10-2 | 28_1 | TTgctcctcctaTT |
| 29 | tttgctcctcctat | 1047 | 1060 | 2-10-2 | 29_1 | TTtgctcctcctAT |
| 30 | ctttgctcctccta | 1048 | 1061 | 2-10-2 | 30_1 | CTttgctcctccTA |
| 31 | cctttgctcctcct | 1049 | 1062 | 2-10-2 | 31_1 | CctttgctcctcCT |
| 32 | ccctttgctcctcc | 1050 | 1063 | 2-10-2 | 32_1 | CCctttgctcctCC |
| 33 | accctttgctcctc | 1051 | 1064 | 2-10-2 | 33_1 | ACcctttgctccTC |
| 34 | aaccctttgctcct | 1052 | 1065 | 2-10-2 | 34_1 | AAccctttgctcCT |
| 35 | aaaccctttgctcc | 1053 | 1066 | 2-10-2 | 35_1 | AAaccctttgctCC |
| 36 | aaaaccctttgctc | 1054 | 1067 | 2-10-2 | 36_1 | AAaaccctttgcTC |
| 37 | aaaaaccctttgct | 1055 | 1068 | 2-10-2 | 37_1 | AAaaaccctttgCT |
| 38 | caaaaaccctttgc | 1056 | 1069 | 2-10-2 | 38_1 | CAaaaaccctttGC |
| 39 | acaaaaaccctttg | 1057 | 1070 | 2-10-2 | 39_1 | ACaaaaacccttTG |
| 40 | aacaaaaacccttt | 1058 | 1071 | 2-10-2 | 40_1 | AAcaaaaaccctTT |
| 41 | aaacaaaaaccctt | 1059 | 1072 | 2-10-2 | 41_1 | AAacaaaaacccTT |
| 42 | aaaacaaaaaccct | 1060 | 1073 | 2-10-2 | 42_1 | AAaacaaaaaccCT |
| 43 | taaaacaaaaaccc | 1061 | 1074 | 2-10-2 | 43_1 | TAaaacaaaaacCC |
| 44 | ataaaacaaaaacc | 1062 | 1075 | 2-10-2 | 44_1 | ATaaaacaaaaaCC |
| 45 | aataaaacaaaaac | 1063 | 1076 | 2-10-2 | 45_1 | AAtaaaacaaaaAC |
| 46 | taataaaacaaaaa | 1064 | 1077 | 2-10-2 | 46_1 | TAataaaacaaaAA |
| 47 | ttaataaaacaaaa | 1065 | 1078 | 2-10-2 | 47_1 | TTaataaaacaaAA |
| 48 | tttaataaaacaaa | 1066 | 1079 | 2-10-2 | 48_1 | TTtaataaaacaAA |
| 49 | atttaataaaacaa | 1067 | 1080 | 2-10-2 | 49_1 | ATttaataaaacAA |
| 50 | ttaaaataaaaatt | 1194 | 1207 | 2-10-2 | 50_1 | TTaaaataaaaaTT |
| 51 | tttaaaataaaaat | 1195 | 1208 | 2-10-2 | 51_1 | TTtaaaataaaaAT |
| 52 | ctttaaaataaaaa | 1196 | 1209 | 2-10-2 | 52_1 | CTttaaaataaaAA |
| 53 | tctttaaaataaaa | 1197 | 1210 | 2-10-2 | 53_1 | TCtttaaaataaAA |
| 54 | atctttaaaataaa | 1198 | 1211 | 2-10-2 | 54_1 | ATctttaaaataAA |
| 55 | catctttaaaataa | 1199 | 1212 | 2-10-2 | 55_1 | CAtctttaaaatAA |
| 56 | ccatctttaaaata | 1200 | 1213 | 2-10-2 | 56_1 | CCatctttaaaaTA |
| 57 | tctaacttaataaa | 2886 | 2899 | 2-10-2 | 57_1 | TCtaacttaataAA |
| 58 | ttctaacttaataa | 2887 | 2900 | 2-10-2 | 58_1 | TTctaacttaatAA |
| 59 | attctaacttaata | 2888 | 2901 | 2-10-2 | 59_1 | ATtctaacttaaTA |
| 60 | cattctaacttaat | 2889 | 2902 | 2-10-2 | 60_1 | CAttctaacttaAT |
| 61 | acattctaacttaa | 2890 | 2903 | 2-10-2 | 61_1 | ACattctaacttAA |
| 62 | tacattctaactta | 2891 | 2904 | 2-10-2 | 62_1 | TAcattctaactTA |
| 63 | ttacattctaactt | 2892 | 2905 | 2-10-2 | 63_1 | TTacattctaacTT |
| 64 | tttacattctaact | 2893 | 2906 | 2-10-2 | 64_1 | TTtacattctaaCT |
| 65 | ttttacattctaac | 2894 | 2907 | 2-10-2 | 65_1 | TTttacattctaAC |
| 66 | tttttacattctaa | 2895 | 2908 | 2-10-2 | 66_1 | TTtttacattctAA |
| 67 | gtttttacattcta | 2896 | 2909 | 2-10-2 | 67_1 | GTttttacattcTA |
| 68 | tgtttttacattct | 2897 | 2910 | 2-10-2 | 68_1 | TGtttttacattCT |
| 69 | ctgtttttacattc | 2898 | 2911 | 2-10-2 | 69_1 | CTgtttttacatTC |
| 70 | ttcaaatatttatt | 2969 | 2982 | 2-10-2 | 70_1 | TTcaaatatttaTT |
| 71 | attcaaatatttat | 2970 | 2983 | 2-10-2 | 71_1 | ATtcaaatatttAT |
| 72 | cattcaaatattta | 2971 | 2984 | 2-10-2 | 72_1 | CAttcaaatattTA |
| 73 | ccattcaaatattt | 2972 | 2985 | 2-10-2 | 73_1 | CCattcaaatatTT |
| 74 | cccattcaaatatt | 2973 | 2986 | 2-10-2 | 74_1 | CCcattcaaataTT |
| 75 | ccccattcaaatat | 2974 | 2987 | 2-10-2 | 75_1 | CCccattcaaatAT |
| 76 | gccccattcaaata | 2975 | 2988 | 2-10-2 | 76_1 | GCcccattcaaaTA |
| 77 | tatacatttttttc | 3173 | 3186 | 2-10-2 | 77_1 | TAtacattttttTC |
| 78 | atatacattttttt | 3174 | 3187 | 2-10-2 | 78_1 | ATatacatttttTT |
| 79 | tatatacatttttt | 3175 | 3188 | 2-10-2 | 79_1 | TAtatacattttTT |
| 80 | atatatacattttt | 3176 | 3189 | 2-10-2 | 80_1 | ATatatacatttTT |
| 81 | aatatatacatttt | 3177 | 3190 | 2-10-2 | 81_1 | AAtatatacattTT |
| 82 | aaatatatacattt | 3178 | 3191 | 2-10-2 | 82_1 | AAatatatacatTT |
| 83 | caaatatatacatt | 3179 | 3192 | 2-10-2 | 83_1 | CAaatatatacaTT |
| 84 | tcaaatatatacat | 3180 | 3193 | 2-10-2 | 84_1 | TCaaatatatacAT |
| 85 | ttcaaatatataca | 3181 | 3194 | 2-10-2 | 85_1 | TTcaaatatataCA |
| 86 | attcaaatatatac | 3182 | 3195 | 2-10-2 | 86_1 | ATtcaaatatatAC |
| 87 | cattcaaatatata | 3183 | 3196 | 2-10-2 | 87_1 | CAttcaaatataTA |
| 88 | ccattcaaatatat | 3184 | 3197 | 2-10-2 | 88_1 | CCattcaaatatAT |
| 89 | tccattcaaatata | 3185 | 3198 | 2-10-2 | 89_1 | TCcattcaaataTA |
| 90 | atccattcaaatat | 3186 | 3199 | 2-10-2 | 90_1 | ATccattcaaatAT |
| 91 | tatccattcaaata | 3187 | 3200 | 2-10-2 | 91_1 | TAtccattcaaaTA |
| 92 | ttatccattcaaat | 3188 | 3201 | 2-10-2 | 92_1 | TTatccattcaaAT |
| 93 | tttatccattcaaa | 3189 | 3202 | 2-10-2 | 93_1 | TTtatccattcaAA |
| 94 | ctttatccattcaa | 3190 | 3203 | 2-10-2 | 94_1 | CTttatccattcAA |
| 95 | tctttatccattca | 3191 | 3204 | 2-10-2 | 95_1 | TCtttatccattCA |
| 96 | ctctttatccattc | 3192 | 3205 | 2-10-2 | 96_1 | CTctttatccatTC |
| 97 | tctctttatccatt | 3193 | 3206 | 2-10-2 | 97_1 | TCtctttatccaTT |
| 98 | ccatatatatctca | 3221 | 3234 | 2-10-2 | 98_1 | CCatatatatctCA |
| 99 | accatatatatctc | 3222 | 3235 | 2-10-2 | 99_1 | ACcatatatatcTC |
| 100 | caccatatatatct | 3223 | 3236 | 2-10-2 | 100_1 | CAccatatatatCT |
| 101 | gcaccatatatatc | 3224 | 3237 | 2-10-2 | 101_1 | GCaccatatataTC |
| 102 | agcaccatatatat | 3225 | 3238 | 2-10-2 | 102_1 | AGcaccatatatAT |
| 103 | cagcaccatatata | 3226 | 3239 | 2-10-2 | 103_1 | CAgcaccatataTA |
| 104 | acagcaccatatat | 3227 | 3240 | 2-10-2 | 104_1 | ACagcaccatatAT |
| 105 | aacagcaccatata | 3228 | 3241 | 2-10-2 | 105_1 | AAcagcaccataTA |
| 106 | aaaacaaacaacaa | 3462 | 3475 | 2-10-2 | 106_1 | AAaacaaacaacAA |
| 107 | taaaacaaacaaca | 3463 | 3476 | 2-10-2 | 107_1 | TAaaacaaacaaCA |
| 108 | ctaaaacaaacaac | 3464 | 3477 | 2-10-2 | 108_1 | CTaaaacaaacaAC |
| 109 | actaaaacaaacaa | 3465 | 3478 | 2-10-2 | 109_1 | ACtaaaacaaacAA |
| 110 | aactaaaacaaaca | 3466 | 3479 | 2-10-2 | 110_1 | AActaaaacaaaCA |
| 111 | gaactaaaacaaac | 3467 | 3480 | 2-10-2 | 111_1 | GAactaaaacaaAC |
| 112 | agaactaaaacaaa | 3468 | 3481 | 2-10-2 | 112_1 | AGaactaaaacaAA |
| 113 | cagaactaaaacaa | 3469 | 3482 | 2-10-2 | 113_1 | CAgaactaaaacAA |
| 114 | ccagaactaaaaca | 3470 | 3483 | 2-10-2 | 114_1 | CCagaactaaaaCA |
| 115 | accagaactaaaac | 3471 | 3484 | 2-10-2 | 115_1 | ACcagaactaaaAC |
| 116 | atgttattatcccc | 3882 | 3895 | 2-10-2 | 116_1 | ATgttattatccCC |
| 117 | tatgttattatccc | 3883 | 3896 | 2-10-2 | 117_1 | TAtgttattatcCC |
| 118 | ctatgttattatcc | 3884 | 3897 | 2-10-2 | 118_1 | CTatgttattatCC |
| 119 | tctatgttattatc | 3885 | 3898 | 2-10-2 | 119_1 | TCtatgttattaTC |
| 120 | tacactctaactct | 3908 | 3921 | 2-10-2 | 120_1 | TAcactctaactCT |
| 121 | ctacactctaactc | 3909 | 3922 | 2-10-2 | 121_1 | CTacactctaacTC |
| 122 | tctacactctaact | 3910 | 3923 | 2-10-2 | 122_1 | TCtacactctaaCT |
| 123 | ctctacactctaac | 3911 | 3924 | 2-10-2 | 123_1 | CTctacactctaAC |
| 124 | tctctacactctaa | 3912 | 3925 | 2-10-2 | 124_1 | TCtctacactctAA |
| 125 | ttctctacactcta | 3913 | 3926 | 2-10-2 | 125_1 | TTctctacactcTA |
| 126 | cttctctacactct | 3914 | 3927 | 2-10-2 | 126_1 | CTtctctacactCT |
| 127 | ccttctctacactc | 3915 | 3928 | 2-10-2 | 127_1 | CCttctctacacTC |
| 128 | tacaacacaaatca | 4102 | 4115 | 2-10-2 | 128_1 | TAcaacacaaatCA |
| 129 | ctacaacacaaatc | 4103 | 4116 | 2-10-2 | 129_1 | CTacaacacaaaTC |
| 130 | actacaacacaaat | 4104 | 4117 | 2-10-2 | 130_1 | ACtacaacacaaAT |
| 131 | aactacaacacaaa | 4105 | 4118 | 2-10-2 | 131_1 | AActacaacacaAA |
| 132 | taactacaacacaa | 4106 | 4119 | 2-10-2 | 132_1 | TAactacaacacAA |
| 133 | ctaactacaacaca | 4107 | 4120 | 2-10-2 | 133_1 | CTaactacaacaCA |
| 134 | actaactacaacac | 4108 | 4121 | 2-10-2 | 134_1 | ACtaactacaacAC |
| 135 | tactaactacaaca | 4109 | 4122 | 2-10-2 | 135_1 | TActaactacaaCA |
| 136 | ctactaactacaac | 4110 | 4123 | 2-10-2 | 136_1 | CTactaactacaAC |
| 137 | actactaactacaa | 4111 | 4124 | 2-10-2 | 137_1 | ACtactaactacAA |
| 138 | cactactaactaca | 4112 | 4125 | 2-10-2 | 138_1 | CActactaactaCA |
| 139 | acactactaactac | 4113 | 4126 | 2-10-2 | 139_1 | ACactactaactAC |
| 140 | gacactactaacta | 4114 | 4127 | 2-10-2 | 140_1 | GAcactactaacTA |
| 141 | agacactactaact | 4115 | 4128 | 2-10-2 | 141_1 | AGacactactaaCT |
| 142 | tttacccccaacct | 4173 | 4186 | 2-10-2 | 142_1 | TTtacccccaacCT |
| 143 | atttacccccaacc | 4174 | 4187 | 2-10-2 | 143_1 | ATttacccccaaCC |
| 144 | catttacccccaac | 4175 | 4188 | 2-10-2 | 144_1 | CAtttacccccaAC |
| 145 | tcatttacccccaa | 4176 | 4189 | 2-10-2 | 145 1 | TCatttacccccAA |
| 146 | atcatttaccccca | 4177 | 4190 | 2-10-2 | 146_1 | ATcatttaccccCA |
| 147 | aatcatttaccccc | 4178 | 4191 | 2-10-2 | 147_1 | AAtcatttacccCC |
| 148 | aaatcatttacccc | 4179 | 4192 | 2-10-2 | 148_1 | AAatcatttaccCC |
| 149 | caaatcatttaccc | 4180 | 4193 | 2-10-2 | 149_1 | CAaatcatttacCC |
| 150 | ccaaatcatttacc | 4181 | 4194 | 2-10-2 | 150 1 | CCaaatcatttaCC |
| 151 | accaaatcatttac | 4182 | 4195 | 2-10-2 | 151_1 | ACcaaatcatttAC |
| 152 | taccaaatcattta | 4183 | 4196 | 2-10-2 | 152_1 | TAccaaatcattTA |
| 153 | ctaccaaatcattt | 4184 | 4197 | 2-10-2 | 153_1 | CTaccaaatcatTT |
| 154 | gctaccaaatcatt | 4185 | 4198 | 2-10-2 | 154_1 | GCtaccaaatcaTT |
| 155 | tgctaccaaatcat | 4186 | 4199 | 2-10-2 | 155_1 | TGctaccaaatcAT |
| 156 | ctgctaccaaatca | 4187 | 4200 | 2-10-2 | 156_1 | CTgctaccaaatCA |
| 157 | actgctaccaaatc | 4188 | 4201 | 2-10-2 | 157_1 | ACtgctaccaaaTC |
| 158 | aactgctaccaaat | 4189 | 4202 | 2-10-2 | 158_1 | AActgctaccaaAT |
| 159 | aagctttaatcaaa | 5102 | 5115 | 2-10-2 | 159_1 | AAgctttaatcaAA |
| 160 | caagctttaatcaa | 5103 | 5116 | 2-10-2 | 160_1 | CAagctttaatcAA |
| 161 | tcaagctttaatca | 5104 | 5117 | 2-10-2 | 161_1 | TCaagctttaatCA |
| 162 | atcaagctttaatc | 5105 | 5118 | 2-10-2 | 162_1 | ATcaagctttaaTC |
| 163 | catcaagctttaat | 5106 | 5119 | 2-10-2 | 163_1 | CAtcaagctttaAT |
| 164 | tcaaactatcccca | 5131 | 5144 | 2-10-2 | 164_1 | TCaaactatcccCA |
| 165 | ctcaaactatcccc | 5132 | 5145 | 2-10-2 | 165_1 | CTcaaactatccCC |
| 166 | tctcaaactatccc | 5133 | 5146 | 2-10-2 | 166_1 | TCtcaaactatcCC |
| 167 | atctcaaactatcc | 5134 | 5147 | 2-10-2 | 167_1 | ATctcaaactatCC |
| 168 | tatctcaaactatc | 5135 | 5148 | 2-10-2 | 168_1 | TAtctcaaactaTC |
| 169 | ttatctcaaactat | 5136 | 5149 | 2-10-2 | 169_1 | TTatctcaaactAT |
| 170 | cttatctcaaacta | 5137 | 5150 | 2-10-2 | 170_1 | CTtatctcaaacTA |
| 171 | ccttatctcaaact | 5138 | 5151 | 2-10-2 | 171_1 | CCttatctcaaaCT |
| 172 | cccttatctcaaac | 5139 | 5152 | 2-10-2 | 172_1 | CCcttatctcaaAC |
| 173 | gcccttatctcaaa | 5140 | 5153 | 2-10-2 | 173_1 | GCccttatctcaAA |
| 174 | tgcccttatctcaa | 5141 | 5154 | 2-10-2 | 174_1 | TGcccttatctcAA |
| 175 | caaacttcatcaaa | 5540 | 5553 | 2-10-2 | 175 1 | CAaacttcatcaAA |
| 176 | tcaaacttcatcaa | 5541 | 5554 | 2-10-2 | 176_1 | TCaaacttcatcAA |
| 177 | atcaaacttcatca | 5542 | 5555 | 2-10-2 | 177_1 | ATcaaacttcatCA |
| 178 | aatcaaacttcatc | 5543 | 5556 | 2-10-2 | 178_1 | AAtcaaacttcaTC |
| 179 | aaatcaaacttcat | 5544 | 5557 | 2-10-2 | 179_1 | AAatcaaacttcAT |
| 180 | gaaatcaaacttca | 5545 | 5558 | 2-10-2 | 180_1 | GAaatcaaacttCA |
| 181 | tgaaatcaaacttc | 5546 | 5559 | 2-10-2 | 181_1 | TGaaatcaaactTC |
| 182 | ttgaaatcaaactt | 5547 | 5560 | 2-10-2 | 182_1 | TTgaaatcaaacTT |
| 183 | aacacaaatttcct | 5693 | 5706 | 2-10-2 | 183_1 | AAcacaaatttcCT |
| 184 | taacacaaatttcc | 5694 | 5707 | 2-10-2 | 184_1 | TAacacaaatttCC |
| 185 | ctaacacaaatttc | 5695 | 5708 | 2-10-2 | 185_1 | CTaacacaaattTC |
| 186 | gctaacacaaattt | 5696 | 5709 | 2-10-2 | 186_1 | GCtaacacaaatTT |
| 187 | tgctaacacaaatt | 5697 | 5710 | 2-10-2 | 187_1 | TGctaacacaaaTT |
| 188 | ttgctaacacaaat | 5698 | 5711 | 2-10-2 | 188_1 | TTgctaacacaaAT |
| 189 | tttgctaacacaaa | 5699 | 5712 | 2-10-2 | 189_1 | TTtgctaacacaAA |
| 190 | ctttgctaacacaa | 5700 | 5713 | 2-10-2 | 190_1 | CTttgctaacacAA |
| 191 | cctttgctaacaca | 5701 | 5714 | 2-10-2 | 191_1 | CctttgctaacaCA |
| 192 | taactaataattat | 6417 | 6430 | 2-10-2 | 192_1 | TAactaataattAT |
| 193 | ataactaataatta | 6418 | 6431 | 2-10-2 | 193_1 | ATaactaataatTA |
| 194 | aataactaataatt | 6419 | 6432 | 2-10-2 | 194_1 | AAtaactaataaTT |
| 195 | taataactaataat | 6420 | 6433 | 2-10-2 | 195_1 | TAataactaataAT |
| 196 | ataataactaataa | 6421 | 6434 | 2-10-2 | 196_1 | ATaataactaatAA |
| 197 | aataataactaata | 6422 | 6435 | 2-10-2 | 197_1 | AAtaataactaaTA |
| 198 | caataataactaat | 6423 | 6436 | 2-10-2 | 198_1 | CAataataactaAT |
| 199 | ccaataataactaa | 6424 | 6437 | 2-10-2 | 199_1 | CCaataataactAA |
| 200 | accaataataacta | 6425 | 6438 | 2-10-2 | 200_1 | ACcaataataacTA |
| 201 | aaccaataataact | 6426 | 6439 | 2-10-2 | 201_1 | AAccaataataaCT |
| 202 | taaccaataataac | 6427 | 6440 | 2-10-2 | 202_1 | TAaccaataataAC |
| 203 | ataaccaataataa | 6428 | 6441 | 2-10-2 | 203_1 | ATaaccaataatAA |
| 204 | tataaccaataata | 6429 | 6442 | 2-10-2 | 204_1 | TAtaaccaataaTA |
| 205 | gtataaccaataat | 6430 | 6443 | 2-10-2 | 205_1 | GTataaccaataAT |
| 206 | acatcacacaattt | 7415 | 7428 | 2-10-2 | 206_1 | ACatcacacaatTT |
| 207 | gacatcacacaatt | 7416 | 7429 | 2-10-2 | 207_1 | GAcatcacacaaTT |
| 208 | tgacatcacacaat | 7417 | 7430 | 2-10-2 | 208_1 | TGacatcacacaAT |
| 209 | ctgacatcacacaa | 7418 | 7431 | 2-10-2 | 209_1 | CTgacatcacacAA |
| 210 | tctgacatcacaca | 7419 | 7432 | 2-10-2 | 210_1 | TCtgacatcacaCA |
| 211 | atctgacatcacac | 7420 | 7433 | 2-10-2 | 211 1 | ATctgacatcacAC |
| 212 | ttccttaacccaac | 7436 | 7449 | 2-10-2 | 212_1 | TTccttaacccaAC |
| 213 | attccttaacccaa | 7437 | 7450 | 2-10-2 | 213_1 | ATtccttaacccAA |
| 214 | tattccttaaccca | 7438 | 7451 | 2-10-2 | 214_1 | TAttccttaaccCA |
| 215 | ctattccttaaccc | 7439 | 7452 | 2-10-2 | 215_1 | CTattccttaacCC |
| 216 | tctattccttaacc | 7440 | 7453 | 2-10-2 | 216_1 | TCtattccttaaCC |
| 217 | gtctattccttaac | 7441 | 7454 | 2-10-2 | 217_1 | GTctattccttaAC |
| 218 | catcaaatctcata | 8609 | 8622 | 2-10-2 | 218_1 | CAtcaaatctcaTA |
| 219 | gcatcaaatctcat | 8610 | 8623 | 2-10-2 | 219_1 | GCatcaaatctcAT |
| 220 | tgcatcaaatctca | 8611 | 8624 | 2-10-2 | 220_1 | TGcatcaaatctCA |
| 221 | atgcatcaaatctc | 8612 | 8625 | 2-10-2 | 221_1 | ATgcatcaaatcTC |
| 222 | aatgcatcaaatct | 8613 | 8626 | 2-10-2 | 222_1 | AAtgcatcaaatCT |
| 223 | attttaaacaaaca | 8637 | 8650 | 2-10-2 | 223_1 | ATtttaaacaaaCA |
| 224 | tattttaaacaaac | 8638 | 8651 | 2-10-2 | 224_1 | TAttttaaacaaAC |
| 225 | ttattttaaacaaa | 8639 | 8652 | 2-10-2 | 225_1 | TTattttaaacaAA |
| 226 | attattttaaacaa | 8640 | 8653 | 2-10-2 | 226_1 | ATtattttaaacAA |
| 227 | aattattttaaaca | 8641 | 8654 | 2-10-2 | 227_1 | AAttattttaaaCA |
| 228 | gaattattttaaac | 8642 | 8655 | 2-10-2 | 228_1 | GAattattttaaAC |
| 229 | ttttacaaatctac | 8693 | 8706 | 2-10-2 | 229_1 | TTttacaaatctAC |
| 230 | attttacaaatcta | 8694 | 8707 | 2-10-2 | 230_1 | ATtttacaaatcTA |
| 231 | tattttacaaatct | 8695 | 8708 | 2-10-2 | 231_1 | TAttttacaaatCT |
| 232 | ttattttacaaatc | 8696 | 8709 | 2-10-2 | 232_1 | TTattttacaaaTC |
| 233 | tttattttacaaat | 8697 | 8710 | 2-10-2 | 233_1 | TTtattttacaaAT |
| 234 | atttattttacaaa | 8698 | 8711 | 2-10-2 | 234_1 | ATttattttacaAA |
| 235 | catttattttacaa | 8699 | 8712 | 2-10-2 | 235_1 | CAtttattttacAA |
| 236 | acatttattttaca | 8700 | 8713 | 2-10-2 | 236_1 | ACatttattttaCA |
| 237 | aacatttattttac | 8701 | 8714 | 2-10-2 | 237_1 | AAcatttattttAC |
| 238 | taacatttatttta | 8702 | 8715 | 2-10-2 | 238_1 | TAacatttatttTA |
| 239 | aatttaatcattaa | 9391 | 9404 | 2-10-2 | 239_1 | AAtttaatcattAA |
| 240 | taatttaatcatta | 9392 | 9405 | 2-10-2 | 240_1 | TAatttaatcatTA |
| 241 | ataatttaatcatt | 9393 | 9406 | 2-10-2 | 241_1 | ATaatttaatcaTT |
| 242 | aataatttaatcat | 9394 | 9407 | 2-10-2 | 242_1 | AAtaatttaatcAT |
| 243 | aaataatttaatca | 9395 | 9408 | 2-10-2 | 243_1 | AAataatttaatCA |
| 244 | taaataatttaatc | 9396 | 9409 | 2-10-2 | 244_1 | TAaataatttaaTC |
| 245 | ctaaataatttaat | 9397 | 9410 | 2-10-2 | 245_1 | CTaaataatttaAT |
| 246 | cctaaataatttaa | 9398 | 9411 | 2-10-2 | 246_1 | CCtaaataatttAA |
| 247 | ccctaaataattta | 9399 | 9412 | 2-10-2 | 247_1 | CCctaaataattTA |
| 248 | cccctaaataattt | 9400 | 9413 | 2-10-2 | 248_1 | CCcctaaataatTT |
| 249 | tcccctaaataatt | 9401 | 9414 | 2-10-2 | 249_1 | TCccctaaataaTT |
| 250 | tatataaaaatcta | 10958 | 10971 | 2-10-2 | 250_1 | TAtataaaaatcTA |
| 251 | ctatataaaaatct | 10959 | 10972 | 2-10-2 | 251_1 | CTatataaaaatCT |
| 252 | tctatataaaaatc | 10960 | 10973 | 2-10-2 | 252_1 | TCtatataaaaaTC |
| 253 | atctatataaaaat | 10961 | 10974 | 2-10-2 | 253_1 | ATctatataaaaAT |
| 254 | tatctatataaaaa | 10962 | 10975 | 2-10-2 | 254_1 | TAtctatataaaAA |
| 255 | ttatctatataaaa | 10963 | 10976 | 2-10-2 | 255_1 | TTatctatataaAA |
| 256 | tttatctatataaa | 10964 | 10977 | 2-10-2 | 256_1 | TTtatctatataAA |
| 257 | ccccactctaatat | 11001 | 11014 | 2-10-2 | 257_1 | CCccactctaatAT |
| 258 | gccccactctaata | 11002 | 11015 | 2-10-2 | 258_1 | GCcccactctaaTA |
| 259 | tgccccactctaat | 11003 | 11016 | 2-10-2 | 259_1 | TGccccactctaAT |
| 260 | atgccccactctaa | 11004 | 11017 | 2-10-2 | 260_1 | ATgccccactctAA |
| 261 | aatgccccactcta | 11005 | 11018 | 2-10-2 | 261_1 | AAtgccccactcTA |
| 262 | aaatgccccactct | 11006 | 11019 | 2-10-2 | 262_1 | AAatgccccactCT |
| 263 | taaatgccccactc | 11007 | 11020 | 2-10-2 | 263_1 | TAaatgccccacTC |
| 264 | ttaaatgccccact | 11008 | 11021 | 2-10-2 | 264_1 | TTaaatgccccaCT |
| 265 | atataaccaccaaa | 11546 | 11559 | 2-10-2 | 265_1 | ATataaccaccaAA |
| 266 | tatataaccaccaa | 11547 | 11560 | 2-10-2 | 266_1 | TAtataaccaccAA |
| 267 | atatataaccacca | 11548 | 11561 | 2-10-2 | 267_1 | ATatataaccacCA |
| 268 | tatatataaccacc | 11549 | 11562 | 2-10-2 | 268_1 | TAtatataaccaCC |
| 269 | atatatataaccac | 11550 | 11563 | 2-10-2 | 269_1 | ATatatataaccAC |
| 270 | aaaattcactatct | 11942 | 11955 | 2-10-2 | 270_1 | AAaattcactatCT |
| 271 | gaaaattcactatc | 11943 | 11956 | 2-10-2 | 271_1 | GAaaattcactaTC |
| 272 | tgaaaattcactat | 11944 | 11957 | 2-10-2 | 272_1 | TGaaaattcactAT |
| 273 | ctgaaaattcacta | 11945 | 11958 | 2-10-2 | 273_1 | CTgaaaattcacTA |
| 274 | tctgaaaattcact | 11946 | 11959 | 2-10-2 | 274_1 | TCtgaaaattcaCT |
| 275 | tactatatacatct | 12176 | 12189 | 2-10-2 | 275_1 | TActatatacatCT |
| 276 | ctactatatacatc | 12177 | 12190 | 2-10-2 | 276_1 | CTactatatacaTC |
| 277 | tctactatatacat | 12178 | 12191 | 2-10-2 | 277_1 | TCtactatatacAT |
| 278 | gtctactatataca | 12179 | 12192 | 2-10-2 | 278_1 | GTctactatataCA |
| 279 | agtctactatatac | 12180 | 12193 | 2-10-2 | 279_1 | AGtctactatatAC |
| 280 | tagtctactatata | 12181 | 12194 | 2-10-2 | 280_1 | TAgtctactataTA |
| 281 | ctagtctactatat | 12182 | 12195 | 2-10-2 | 281_1 | CTagtctactatAT |
| 282 | actagtctactata | 12183 | 12196 | 2-10-2 | 282_1 | ACtagtctactaTA |
| 283 | aactagtctactat | 12184 | 12197 | 2-10-2 | 283_1 | AActagtctactAT |
| 284 | tattctacccataa | 12211 | 12224 | 2-10-2 | 284_1 | TAttctacccatAA |
| 285 | atattctacccata | 12212 | 12225 | 2-10-2 | 285_1 | ATattctacccaTA |
| 286 | tatattctacccat | 12213 | 12226 | 2-10-2 | 286_1 | TAtattctacccAT |
| 287 | gtatattctaccca | 12214 | 12227 | 2-10-2 | 287_1 | GTatattctaccCA |
| 288 | tgtatattctaccc | 12215 | 12228 | 2-10-2 | 288_1 | TGtatattctacCC |
| 289 | atgtatattctacc | 12216 | 12229 | 2-10-2 | 289_1 | ATgtatattctaCC |
| 290 | ccacacaattccta | 12254 | 12267 | 2-10-2 | 290_1 | CCacacaattccTA |
| 291 | accacacaattcct | 12255 | 12268 | 2-10-2 | 291_1 | ACcacacaattcCT |
| 292 | aaccacacaattcc | 12256 | 12269 | 2-10-2 | 292_1 | AAccacacaattCC |
| 293 | aaaccacacaattc | 12257 | 12270 | 2-10-2 | 293_1 | AAaccacacaatTC |
| 294 | aaaaccacacaatt | 12258 | 12271 | 2-10-2 | 294_1 | AAaaccacacaaTT |
| 295 | gaaaaccacacaat | 12259 | 12272 | 2-10-2 | 295_1 | GAaaaccacacaAT |
| 296 | agaaaaccacacaa | 12260 | 12273 | 2-10-2 | 296_1 | AGaaaaccacacAA |
| 297 | cagaaaaccacaca | 12261 | 12274 | 2-10-2 | 297_1 | CAgaaaaccacaCA |
| 298 | ccagaaaaccacac | 12262 | 12275 | 2-10-2 | 298_1 | CCagaaaaccacAC |
| 299 | tccagaaaaccaca | 12263 | 12276 | 2-10-2 | 299_1 | TCcagaaaaccaCA |
| 300 | aaatccataaaaaa | 12327 | 12340 | 2-10-2 | 300_1 | AAatccataaaaAA |
| 301 | taaatccataaaaa | 12328 | 12341 | 2-10-2 | 301 1 | TAaatccataaaAA |
| 302 | ctaaatccataaaa | 12329 | 12342 | 2-10-2 | 302_1 | CTaaatccataaAA |
| 303 | actaaatccataaa | 12330 | 12343 | 2-10-2 | 303_1 | ACtaaatccataAA |
| 304 | cactaaatccataa | 12331 | 12344 | 2-10-2 | 304_1 | CActaaatccatAA |
| 305 | tcactaaatccata | 12332 | 12345 | 2-10-2 | 305_1 | TCactaaatccaTA |
| 306 | atcactaaatccat | 12333 | 12346 | 2-10-2 | 306_1 | ATcactaaatccAT |
| 307 | tatcactaaatcca | 12334 | 12347 | 2-10-2 | 307_1 | TAtcactaaatcCA |
| 308 | atatcactaaatcc | 12335 | 12348 | 2-10-2 | 308_1 | ATatcactaaatCC |
| 309 | tatatcactaaatc | 12336 | 12349 | 2-10-2 | 309_1 | TAtatcactaaaTC |
| 310 | atatatcactaaat | 12337 | 12350 | 2-10-2 | 310_1 | ATatatcactaaAT |
| 311 | gatatatcactaaa | 12338 | 12351 | 2-10-2 | 311_1 | GAtatatcactaAA |
| 312 | agatatatcactaa | 12339 | 12352 | 2-10-2 | 312_1 | AGatatatcactAA |
| 313 | tagatatatcacta | 12340 | 12353 | 2-10-2 | 313_1 | TAgatatatcacTA |
| 314 | tataaatttctcta | 12690 | 12703 | 2-10-2 | 314_1 | TAtaaatttctcTA |
| 315 | atataaatttctct | 12691 | 12704 | 2-10-2 | 315_1 | ATataaatttctCT |
| 316 | tatataaatttctc | 12692 | 12705 | 2-10-2 | 316_1 | TAtataaatttcTC |
| 317 | atatataaatttct | 12693 | 12706 | 2-10-2 | 317_1 | ATatataaatttCT |
| 318 | catatataaatttc | 12694 | 12707 | 2-10-2 | 318_1 | CAtatataaattTC |
| 319 | tcatatataaattt | 12695 | 12708 | 2-10-2 | 319_1 | TCatatataaatTT |
| 320 | ctccattccaaatt | 12739 | 12752 | 2-10-2 | 320_1 | CTccattccaaaTT |
| 321 | actccattccaaat | 12740 | 12753 | 2-10-2 | 321_1 | ACtccattccaaAT |
| 322 | cactccattccaaa | 12741 | 12754 | 2-10-2 | 322_1 | CActccattccaAA |
| 323 | ccactccattccaa | 12742 | 12755 | 2-10-2 | 323_1 | CCactccattccAA |
| 324 | accactccattcca | 12743 | 12756 | 2-10-2 | 324_1 | ACcactccattcCA |
| 325 | aaccactccattcc | 12744 | 12757 | 2-10-2 | 325_1 | AAccactccattCC |
| 326 | aaaccactccattc | 12745 | 12758 | 2-10-2 | 326_1 | AAaccactccatTC |
| 327 | tcacacaaccatat | 13155 | 13168 | 2-10-2 | 327_1 | TCacacaaccatAT |
| 328 | atcacacaaccata | 13156 | 13169 | 2-10-2 | 328_1 | ATcacacaaccaTA |
| 329 | gatcacacaaccat | 13157 | 13170 | 2-10-2 | 329_1 | GAtcacacaaccAT |
| 330 | agatcacacaacca | 13158 | 13171 | 2-10-2 | 330_1 | AGatcacacaacCA |
| 331 | aagatcacacaacc | 13159 | 13172 | 2-10-2 | 331_1 | AAgatcacacaaCC |
| 332 | aaagatcacacaac | 13160 | 13173 | 2-10-2 | 332_1 | AAagatcacacaAC |
| 333 | aaaagatcacacaa | 13161 | 13174 | 2-10-2 | 333_1 | AAaagatcacacAA |
| 334 | taaaagatcacaca | 13162 | 13175 | 2-10-2 | 334_1 | TAaaagatcacaCA |
| 335 | ttcatttctaaaaa | 13297 | 13310 | 2-10-2 | 335_1 | TTcatttctaaaAA |
| 336 | tttcatttctaaaa | 13298 | 13311 | 2-10-2 | 336_1 | TTtcatttctaaAA |
| 337 | ctttcatttctaaa | 13299 | 13312 | 2-10-2 | 337_1 | CTttcatttctaAA |
| 338 | tctttcatttctaa | 13300 | 13313 | 2-10-2 | 338_1 | TCtttcatttctAA |
| 339 | atctttcatttcta | 13301 | 13314 | 2-10-2 | 339_1 | ATctttcatttcTA |
| 340 | gatctttcatttct | 13302 | 13315 | 2-10-2 | 340_1 | GAtctttcatttCT |
| 341 | tgatctttcatttc | 13303 | 13316 | 2-10-2 | 341_1 | TGatctttcattTC |
| 342 | atgatctttcattt | 13304 | 13317 | 2-10-2 | 342_1 | ATgatctttcatTT |
| 343 | ataaaaacccactt | 13990 | 14003 | 2-10-2 | 343_1 | ATaaaaacccacTT |
| 344 | cataaaaacccact | 13991 | 14004 | 2-10-2 | 344_1 | CAtaaaaacccaCT |
| 345 | acataaaaacccac | 13992 | 14005 | 2-10-2 | 345_1 | ACataaaaacccAC |
| 346 | cacataaaaaccca | 13993 | 14006 | 2-10-2 | 346_1 | CAcataaaaaccCA |
| 347 | tcacataaaaaccc | 13994 | 14007 | 2-10-2 | 347_1 | TCacataaaaacCC |
| 348 | atcacataaaaacc | 13995 | 14008 | 2-10-2 | 348_1 | ATcacataaaaaCC |
| 349 | catcacataaaaac | 13996 | 14009 | 2-10-2 | 349_1 | CAtcacataaaaAC |
| 350 | tcatcacataaaaa | 13997 | 14010 | 2-10-2 | 350_1 | TCatcacataaaAA |
| 351 | gtcatcacataaaa | 13998 | 14011 | 2-10-2 | 351_1 | GTcatcacataaAA |
| 352 | agtcatcacataaa | 13999 | 14012 | 2-10-2 | 352_1 | AGtcatcacataAA |
| 353 | tagtcatcacataa | 14000 | 14013 | 2-10-2 | 353_1 | TAgtcatcacatAA |
| 354 | atagtcatcacata | 14001 | 14014 | 2-10-2 | 354_1 | ATagtcatcacaTA |
| 355 | catagtcatcacat | 14002 | 14015 | 2-10-2 | 355_1 | CAtagtcatcacAT |
| 356 | taaatacaaatcta | 14041 | 14054 | 2-10-2 | 356_1 | TAaatacaaatcTA |
| 357 | ctaaatacaaatct | 14042 | 14055 | 2-10-2 | 357_1 | CTaaatacaaatCT |
| 358 | gctaaatacaaatc | 14043 | 14056 | 2-10-2 | 358_1 | GCtaaatacaaaTC |
| 359 | tgctaaatacaaat | 14044 | 14057 | 2-10-2 | 359_1 | TGctaaatacaaAT |
| 360 | atgctaaatacaaa | 14045 | 14058 | 2-10-2 | 360_1 | ATgctaaatacaAA |
| 361 | tatgctaaatacaa | 14046 | 14059 | 2-10-2 | 361_1 | TAtgctaaatacAA |
| 362 | aatcttacactaaa | 14119 | 14132 | 2-10-2 | 362_1 | AAtcttacactaAA |
| 363 | taatcttacactaa | 14120 | 14133 | 2-10-2 | 363_1 | TAatcttacactAA |
| 364 | ataatcttacacta | 14121 | 14134 | 2-10-2 | 364_1 | ATaatcttacacTA |
| 365 | aataatcttacact | 14122 | 14135 | 2-10-2 | 365_1 | AAtaatcttacaCT |
| 366 | gaataatcttacac | 14123 | 14136 | 2-10-2 | 366_1 | GAataatcttacAC |
| 367 | tgaataatcttaca | 14124 | 14137 | 2-10-2 | 367_1 | TGaataatcttaCA |
| 368 | atgaataatcttac | 14125 | 14138 | 2-10-2 | 368_1 | ATgaataatcttAC |
| 369 | caaaattctaataa | 14257 | 14270 | 2-10-2 | 369_1 | CAaaattctaatAA |
| 370 | tcaaaattctaata | 14258 | 14271 | 2-10-2 | 370_1 | TCaaaattctaaTA |
| 371 | ttcaaaattctaat | 14259 | 14272 | 2-10-2 | 371_1 | TTcaaaattctaAT |
| 372 | attcaaaattctaa | 14260 | 14273 | 2-10-2 | 372_1 | ATtcaaaattctAA |
| 373 | gattcaaaattcta | 14261 | 14274 | 2-10-2 | 373_1 | GAttcaaaattcTA |
| 374 | agattcaaaattct | 14262 | 14275 | 2-10-2 | 374_1 | AGattcaaaattCT |
| 375 | attactacaaccaa | 14570 | 14583 | 2-10-2 | 375_1 | ATtactacaaccAA |
| 376 | cattactacaacca | 14571 | 14584 | 2-10-2 | 376_1 | CAttactacaacCA |
| 377 | ccattactacaacc | 14572 | 14585 | 2-10-2 | 377_1 | CCattactacaaCC |
| 378 | accattactacaac | 14573 | 14586 | 2-10-2 | 378_1 | ACcattactacaAC |
| 379 | aaccattactacaa | 14574 | 14587 | 2-10-2 | 379_1 | AAccattactacAA |
| 380 | aaaccattactaca | 14575 | 14588 | 2-10-2 | 380_1 | AAaccattactaCA |
| 381 | gaaaccattactac | 14576 | 14589 | 2-10-2 | 381_1 | GAaaccattactAC |
| 382 | tgaaaccattacta | 14577 | 14590 | 2-10-2 | 382_1 | TGaaaccattacTA |
| 383 | atgaaaccattact | 14578 | 14591 | 2-10-2 | 383_1 | ATgaaaccattaCT |
| 384 | atttttaaaaacac | 15778 | 15791 | 2-10-2 | 384_1 | ATttttaaaaacAC |
| 385 | aatttttaaaaaca | 15779 | 15792 | 2-10-2 | 385_1 | AAtttttaaaaaCA |
| 386 | taatttttaaaaac | 15780 | 15793 | 2-10-2 | 386_1 | TAatttttaaaaAC |
| 387 | ataatttttaaaaa | 15781 | 15794 | 2-10-2 | 387_1 | ATaatttttaaaAA |
| 388 | cataatttttaaaa | 15782 | 15795 | 2-10-2 | 388_1 | CAtaatttttaaAA |
| 389 | tcataatttttaaa | 15783 | 15796 | 2-10-2 | 389_1 | TCataatttttaAA |
| 390 | atcataatttttaa | 15784 | 15797 | 2-10-2 | 390_1 | ATcataatttttAA |
| 391 | ctttatacaaaaaa | 15814 | 15827 | 2-10-2 | 391_1 | CTttatacaaaaAA |
| 392 | actttatacaaaaa | 15815 | 15828 | 2-10-2 | 392_1 | ACtttatacaaaAA |
| 393 | tactttatacaaaa | 15816 | 15829 | 2-10-2 | 393_1 | TActttatacaaAA |
| 394 | ttactttatacaaa | 15817 | 15830 | 2-10-2 | 394_1 | TTactttatacaAA |
| 395 | cttactttatacaa | 15818 | 15831 | 2-10-2 | 395_1 | CTtactttatacAA |
| 396 | gcttactttataca | 15819 | 15832 | 2-10-2 | 396_1 | GCttactttataCA |
| 397 | tgcttactttatac | 15820 | 15833 | 2-10-2 | 397_1 | TGcttactttatAC |
| 398 | tctcaaaataataa | 15877 | 15890 | 2-10-2 | 398_1 | TCtcaaaataatAA |
| 399 | ctctcaaaataata | 15878 | 15891 | 2-10-2 | 399_1 | CTctcaaaataaTA |
| 400 | tctctcaaaataat | 15879 | 15892 | 2-10-2 | 400_1 | TCtctcaaaataAT |
| 401 | atctctcaaaataa | 15880 | 15893 | 2-10-2 | 401_1 | ATctctcaaaatAA |
| 402 | aatctctcaaaata | 15881 | 15894 | 2-10-2 | 402_1 | AAtctctcaaaaTA |
| 403 | aaatctctcaaaat | 15882 | 15895 | 2-10-2 | 403_1 | AAatctctcaaaAT |
| 404 | taaatctctcaaaa | 15883 | 15896 | 2-10-2 | 404_1 | TAaatctctcaaAA |
| 405 | ttaaatctctcaaa | 15884 | 15897 | 2-10-2 | 405_1 | TTaaatctctcaAA |
| 406 | tttaaatctctcaa | 15885 | 15898 | 2-10-2 | 406_1 | TTtaaatctctcAA |
| 407 | ttttaaatctctca | 15886 | 15899 | 2-10-2 | 407_1 | TTttaaatctctCA |
| 408 | taatactttttcca | 16080 | 16093 | 2-10-2 | 408_1 | TAatactttttcCA |
| 409 | ttaatactttttcc | 16081 | 16094 | 2-10-2 | 409_1 | TTaatactttttCC |
| 410 | gttaatactttttc | 16082 | 16095 | 2-10-2 | 410_1 | GTtaatacttttTC |
| 411 | tgttaatacttttt | 16083 | 16096 | 2-10-2 | 411_1 | TGttaatactttTT |
| 412 | atgttaatactttt | 16084 | 16097 | 2-10-2 | 412_1 | ATgttaatacttTT |
| 413 | ttatcactaccaca | 16187 | 16200 | 2-10-2 | 413_1 | TTatcactaccaCA |
| 414 | tttatcactaccac | 16188 | 16201 | 2-10-2 | 414_1 | TTtatcactaccAC |
| 415 | atttatcactacca | 16189 | 16202 | 2-10-2 | 415_1 | ATttatcactacCA |
| 416 | catttatcactacc | 16190 | 16203 | 2-10-2 | 416_1 | CAtttatcactaCC |
| 417 | tcatttatcactac | 16191 | 16204 | 2-10-2 | 417_1 | TCatttatcactAC |
| 418 | atcatttatcacta | 16192 | 16205 | 2-10-2 | 418_1 | ATcatttatcacTA |
| 419 | catcatttatcact | 16193 | 16206 | 2-10-2 | 419_1 | CAtcatttatcaCT |
| 420 | acatcatttatcac | 16194 | 16207 | 2-10-2 | 420_1 | ACatcatttatcAC |
| 421 | aacatcatttatca | 16195 | 16208 | 2-10-2 | 421_1 | AAcatcatttatCA |
| 422 | taacatcatttatc | 16196 | 16209 | 2-10-2 | 422_1 | TAacatcatttaTC |
| 423 | ttaacatcatttat | 16197 | 16210 | 2-10-2 | 423_1 | TTaacatcatttAT |
| 424 | attaacatcattta | 16198 | 16211 | 2-10-2 | 424_1 | ATtaacatcattTA |
| 425 | aattaacatcattt | 16199 | 16212 | 2-10-2 | 425_1 | AAttaacatcatTT |
| 426 | taattaacatcatt | 16200 | 16213 | 2-10-2 | 426_1 | TAattaacatcaTT |
| 427 | ctaattaacatcat | 16201 | 16214 | 2-10-2 | 427_1 | CTaattaacatcAT |
| 428 | cctaattaacatca | 16202 | 16215 | 2-10-2 | 428_1 | CCtaattaacatCA |
| 429 | ccctaattaacatc | 16203 | 16216 | 2-10-2 | 429_1 | CCctaattaacaTC |
| 430 | gccctaattaacat | 16204 | 16217 | 2-10-2 | 430_1 | GCcctaattaacAT |
| 431 | ggccctaattaaca | 16205 | 16218 | 2-10-2 | 431_1 | GGccctaattaaCA |
| 432 | cggccctaattaac | 16206 | 16219 | 2-10-2 | 432_1 | CGgccctaattaAC |
| 433 | aaacacattttttt | 16494 | 16507 | 2-10-2 | 433_1 | AAacacatttttTT |
| 434 | taaacacatttttt | 16495 | 16508 | 2-10-2 | 434_1 | TAaacacattttTT |
| 435 | ataaacacattttt | 16496 | 16509 | 2-10-2 | 435_1 | ATaaacacatttTT |
| 436 | tataaacacatttt | 16497 | 16510 | 2-10-2 | 436_1 | TAtaaacacattTT |
| 437 | atataaacacattt | 16498 | 16511 | 2-10-2 | 437_1 | ATataaacacatTT |
| 438 | catataaacacatt | 16499 | 16512 | 2-10-2 | 438_1 | CAtataaacacaTT |
| 439 | acatataaacacat | 16500 | 16513 | 2-10-2 | 439_1 | ACatataaacacAT |
| 440 | aacatataaacaca | 16501 | 16514 | 2-10-2 | 440_1 | AAcatataaacaCA |
| 441 | taacatataaacac | 16502 | 16515 | 2-10-2 | 441_1 | TAacatataaacAC |
| 442 | ataacatataaaca | 16503 | 16516 | 2-10-2 | 442_1 | ATaacatataaaCA |
| 443 | tataacatataaac | 16504 | 16517 | 2-10-2 | 443_1 | TAtaacatataaAC |
| 444 | atataacatataaa | 16505 | 16518 | 2-10-2 | 444_1 | ATataacatataAA |
| 445 | catataacatataa | 16506 | 16519 | 2-10-2 | 445_1 | CAtataacatatAA |
| 446 | acatataacatata | 16507 | 16520 | 2-10-2 | 446_1 | ACatataacataTA |
| 447 | cacatataacatat | 16508 | 16521 | 2-10-2 | 447_1 | CAcatataacatAT |
| 448 | tcacatataacata | 16509 | 16522 | 2-10-2 | 448_1 | TCacatataacaTA |
| 449 | atcacatataacat | 16510 | 16523 | 2-10-2 | 449_1 | ATcacatataacAT |
| 450 | tatcacatataaca | 16511 | 16524 | 2-10-2 | 450_1 | TAtcacatataaCA |
| 451 | ctatcacatataac | 16512 | 16525 | 2-10-2 | 451_1 | CTatcacatataAC |
| 452 | actatcacatataa | 16513 | 16526 | 2-10-2 | 452_1 | ACtatcacatatAA |
| 453 | cactatcacatata | 16514 | 16527 | 2-10-2 | 453_1 | CActatcacataTA |
| 454 | gtccaacataactc | 16834 | 16847 | 2-10-2 | 454_1 | GTccaacataacTC |
| 455 | agtccaacataact | 16835 | 16848 | 2-10-2 | 455_1 | AGtccaacataaCT |
| 456 | cagtccaacataac | 16836 | 16849 | 2-10-2 | 456_1 | CAgtccaacataAC |
| 457 | tcagtccaacataa | 16837 | 16850 | 2-10-2 | 457_1 | TCagtccaacatAA |
| 458 | atcagtccaacata | 16838 | 16851 | 2-10-2 | 458_1 | ATcagtccaacaTA |
| 459 | tatcagtccaacat | 16839 | 16852 | 2-10-2 | 459_1 | TAtcagtccaacAT |
| 460 | aaaccctcccaaaa | 16921 | 16934 | 2-10-2 | 460_1 | AAaccctcccaaAA |
| 461 | taaaccctcccaaa | 16922 | 16935 | 2-10-2 | 461_1 | TAaaccctcccaAA |
| 462 | ttaaaccctcccaa | 16923 | 16936 | 2-10-2 | 462_1 | TTaaaccctcccAA |
| 463 | attaaaccctccca | 16924 | 16937 | 2-10-2 | 463_1 | ATtaaaccctccCA |
| 464 | cattaaaccctccc | 16925 | 16938 | 2-10-2 | 464_1 | CAttaaaccctcCC |
| 465 | acattaaaccctcc | 16926 | 16939 | 2-10-2 | 465_1 | ACattaaaccctCC |
| 466 | aacattaaaccctc | 16927 | 16940 | 2-10-2 | 466_1 | AAcattaaacccTC |
| 467 | aaacattaaaccct | 16928 | 16941 | 2-10-2 | 467_1 | AAacattaaaccCT |
| 468 | taaacattaaaccc | 16929 | 16942 | 2-10-2 | 468_1 | TAaacattaaacCC |
| 469 | ataaacattaaacc | 16930 | 16943 | 2-10-2 | 469_1 | ATaaacattaaaCC |
| 470 | tataaacattaaac | 16931 | 16944 | 2-10-2 | 470_1 | TAtaaacattaaAC |
| 471 | ctataaacattaaa | 16932 | 16945 | 2-10-2 | 471_1 | CTataaacattaAA |
| 472 | actataaacattaa | 16933 | 16946 | 2-10-2 | 472_1 | ACtataaacattAA |
| 473 | aactataaacatta | 16934 | 16947 | 2-10-2 | 473_1 | AActataaacatTA |
| 474 | aaactataaacatt | 16935 | 16948 | 2-10-2 | 474_1 | AAactataaacaTT |
| 475 | taaactataaacat | 16936 | 16949 | 2-10-2 | 475_1 | TAaactataaacAT |
| 476 | ttaaactataaaca | 16937 | 16950 | 2-10-2 | 476_1 | TTaaactataaaCA |
| 477 | tttaaactataaac | 16938 | 16951 | 2-10-2 | 477_1 | TTtaaactataaAC |
| 478 | ctttaaactataaa | 16939 | 16952 | 2-10-2 | 478_1 | CTttaaactataAA |
| 479 | gctttaaactataa | 16940 | 16953 | 2-10-2 | 479_1 | GCtttaaactatAA |
| 480 | tgctttaaactata | 16941 | 16954 | 2-10-2 | 480_1 | TGctttaaactaTA |
| 481 | cagcctatcaccac | 18018 | 18031 | 2-10-2 | 481_1 | CAgcctatcaccAC |
| 482 | acagcctatcacca | 18019 | 18032 | 2-10-2 | 482_1 | ACagcctatcacCA |
| 483 | cacagcctatcacc | 18020 | 18033 | 2-10-2 | 483_1 | CAcagcctatcaCC |
| 484 | tcacagcctatcac | 18021 | 18034 | 2-10-2 | 484_1 | TCacagcctatcAC |
| 485 | atcacagcctatca | 18022 | 18035 | 2-10-2 | 485_1 | ATcacagcctatCA |
| 486 | aatcacagcctatc | 18023 | 18036 | 2-10-2 | 486_1 | AAtcacagcctaTC |
| 487 | aaatcacagcctat | 18024 | 18037 | 2-10-2 | 487_1 | AAatcacagcctAT |
| 488 | caaatcacagccta | 18025 | 18038 | 2-10-2 | 488_1 | CAaatcacagccTA |
| 489 | ccaaatcacagcct | 18026 | 18039 | 2-10-2 | 489_1 | CCaaatcacagcCT |
| 490 | cccaaatcacagcc | 18027 | 18040 | 2-10-2 | 490_1 | CCcaaatcacagCC |
| 491 | acccaaatcacagc | 18028 | 18041 | 2-10-2 | 491_1 | ACccaaatcacaGC |
| 492 | cacccaaatcacag | 18029 | 18042 | 2-10-2 | 492_1 | CAcccaaatcacAG |
| 493 | tcacccaaatcaca | 18030 | 18043 | 2-10-2 | 493_1 | TCacccaaatcaCA |
| 494 | gtcacccaaatcac | 18031 | 18044 | 2-10-2 | 494_1 | GTcacccaaatcAC |
| 495 | cgtcacccaaatca | 18032 | 18045 | 2-10-2 | 495_1 | CGtcacccaaatCA |
| 496 | gcgtcacccaaatc | 18033 | 18046 | 2-10-2 | 496_1 | GCgtcacccaaaTC |
| 497 | agcgtcacccaaat | 18034 | 18047 | 2-10-2 | 497_1 | AGcgtcacccaaAT |
| 498 | atcctaaaatcact | 18630 | 18643 | 2-10-2 | 498_1 | ATcctaaaatcaCT |
| 499 | gatcctaaaatcac | 18631 | 18644 | 2-10-2 | 499_1 | GAtcctaaaatcAC |
| 500 | agatcctaaaatca | 18632 | 18645 | 2-10-2 | 500_1 | AGatcctaaaatCA |
| 501 | cagatcctaaaatc | 18633 | 18646 | 2-10-2 | 501_1 | CAgatcctaaaaTC |
| 502 | tcagatcctaaaat | 18634 | 18647 | 2-10-2 | 502_1 | TCagatcctaaaAT |
| 503 | aaaccaatcatcat | 19107 | 19120 | 2-10-2 | 503_1 | AAaccaatcatcAT |
| 504 | aaaaccaatcatca | 19108 | 19121 | 2-10-2 | 504_1 | AAaaccaatcatCA |
| 505 | taaaaccaatcatc | 19109 | 19122 | 2-10-2 | 505_1 | TAaaaccaatcaTC |
| 506 | gtaaaaccaatcat | 19110 | 19123 | 2-10-2 | 506_1 | GTaaaaccaatcAT |
| 507 | agtaaaaccaatca | 19111 | 19124 | 2-10-2 | 507_1 | AGtaaaaccaatCA |
| 508 | aagtaaaaccaatc | 19112 | 19125 | 2-10-2 | 508_1 | AAgtaaaaccaaTC |
| 509 | aaagtaaaaccaat | 19113 | 19126 | 2-10-2 | 509_1 | AAagtaaaaccaAT |
| 510 | catctctactaaaa | 20214 | 20227 | 2-10-2 | 510_1 | CAtctctactaaAA |
| 511 | ccatctctactaaa | 20215 | 20228 | 2-10-2 | 511_1 | CCatctctactaAA |
| 512 | tccatctctactaa | 20216 | 20229 | 2-10-2 | 512_1 | TCcatctctactAA |
| 513 | ttccatctctacta | 20217 | 20230 | 2-10-2 | 513_1 | TTccatctctacTA |
| 514 | cttccatctctact | 20218 | 20231 | 2-10-2 | 514_1 | CTtccatctctaCT |
| 515 | ccttccatctctac | 20219 | 20232 | 2-10-2 | 515_1 | CCttccatctctAC |
| 516 | cccttccatctcta | 20220 | 20233 | 2-10-2 | 516_1 | CCcttccatctcTA |
| 517 | acataacaaaccca | 20555 | 20568 | 2-10-2 | 517_1 | ACataacaaaccCA |
| 518 | tacataacaaaccc | 20556 | 20569 | 2-10-2 | 518_1 | TAcataacaaacCC |
| 519 | ctacataacaaacc | 20557 | 20570 | 2-10-2 | 519_1 | CTacataacaaaCC |
| 520 | actacataacaaac | 20558 | 20571 | 2-10-2 | 520_1 | ACtacataacaaAC |
| 521 | aactacataacaaa | 20559 | 20572 | 2-10-2 | 521_1 | AActacataacaAA |
| 522 | taactacataacaa | 20560 | 20573 | 2-10-2 | 522_1 | TAactacataacAA |
| 523 | ataactacataaca | 20561 | 20574 | 2-10-2 | 523_1 | ATaactacataaCA |
| 524 | aataactacataac | 20562 | 20575 | 2-10-2 | 524_1 | AAtaactacataAC |
| 525 | caataactacataa | 20563 | 20576 | 2-10-2 | 525_1 | CAataactacatAA |
| 526 | acaataactacata | 20564 | 20577 | 2-10-2 | 526_1 | ACaataactacaTA |
| 527 | cacaataactacat | 20565 | 20578 | 2-10-2 | 527_1 | CAcaataactacAT |
| 528 | tcacaataactaca | 20566 | 20579 | 2-10-2 | 528_1 | TCacaataactaCA |
| 529 | ttcacaataactac | 20567 | 20580 | 2-10-2 | 529_1 | TTcacaataactAC |
| 530 | attcacaataacta | 20568 | 20581 | 2-10-2 | 530_1 | ATtcacaataacTA |
| 531 | aattcacaataact | 20569 | 20582 | 2-10-2 | 531_1 | AAttcacaataaCT |
| 532 | gaattcacaataac | 20570 | 20583 | 2-10-2 | 532_1 | GAattcacaataAC |
| 533 | tgaattcacaataa | 20571 | 20584 | 2-10-2 | 533_1 | TGaattcacaatAA |
| 534 | ctaaaacaatctaa | 22073 | 22086 | 2-10-2 | 534_1 | CTaaaacaatctAA |
| 535 | cctaaaacaatcta | 22074 | 22087 | 2-10-2 | 535_1 | CCtaaaacaatcTA |
| 536 | acctaaaacaatct | 22075 | 22088 | 2-10-2 | 536_1 | ACctaaaacaatCT |
| 537 | tacctaaaacaatc | 22076 | 22089 | 2-10-2 | 537_1 | TAcctaaaacaaTC |
| 538 | atacctaaaacaat | 22077 | 22090 | 2-10-2 | 538_1 | ATacctaaaacaAT |
| 539 | tatacctaaaacaa | 22078 | 22091 | 2-10-2 | 539_1 | TAtacctaaaacAA |
| 540 | ctatacctaaaaca | 22079 | 22092 | 2-10-2 | 540_1 | CTatacctaaaaCA |
| 541 | gctatacctaaaac | 22080 | 22093 | 2-10-2 | 541_1 | GCtatacctaaaAC |
| 542 | ttgtaactaaaaat | 22254 | 22267 | 2-10-2 | 542_1 | TTgtaactaaaaAT |
| 543 | cttgtaactaaaaa | 22255 | 22268 | 2-10-2 | 543_1 | CTtgtaactaaaAA |
| 544 | ccttgtaactaaaa | 22256 | 22269 | 2-10-2 | 544_1 | CCttgtaactaaAA |
| 545 | cccttgtaactaaa | 22257 | 22270 | 2-10-2 | 545_1 | CCcttgtaactaAA |
| 546 | ccccttgtaactaa | 22258 | 22271 | 2-10-2 | 546_1 | CCccttgtaactAA |
| 547 | accccttgtaacta | 22259 | 22272 | 2-10-2 | 547_1 | ACcccttgtaacTA |
| 548 | caccccttgtaact | 22260 | 22273 | 2-10-2 | 548_1 | CAccccttgtaaCT |
| 549 | acaccccttgtaac | 22261 | 22274 | 2-10-2 | 549_1 | ACaccccttgtaAC |
| 550 | ttcatatatacatc | 22424 | 22437 | 2-10-2 | 550_1 | TTcatatatacaTC |
| 551 | cttcatatatacat | 22425 | 22438 | 2-10-2 | 551_1 | CTtcatatatacAT |
| 552 | ccttcatatataca | 22426 | 22439 | 2-10-2 | 552_1 | CCttcatatataCA |
| 553 | cccttcatatatac | 22427 | 22440 | 2-10-2 | 553_1 | CCcttcatatatAC |
| 554 | acccttcatatata | 22428 | 22441 | 2-10-2 | 554_1 | ACccttcatataTA |
| 555 | tacccttcatatat | 22429 | 22442 | 2-10-2 | 555_1 | TAcccttcatatAT |
| 556 | ttacccttcatata | 22430 | 22443 | 2-10-2 | 556_1 | TTacccttcataTA |
| 557 | attacccttcatat | 22431 | 22444 | 2-10-2 | 557_1 | ATtacccttcatAT |
| 558 | cattacccttcata | 22432 | 22445 | 2-10-2 | 558_1 | CAttacccttcaTA |
| 559 | acattacccttcat | 22433 | 22446 | 2-10-2 | 559_1 | ACattacccttcAT |
| 560 | tacattacccttca | 22434 | 22447 | 2-10-2 | 560_1 | TAcattacccttCA |
| 561 | tcttatacttacta | 23204 | 23217 | 2-10-2 | 561_1 | TCttatacttacTA |
| 562 | ttcttatacttact | 23205 | 23218 | 2-10-2 | 562_1 | TTcttatacttaCT |
| 563 | attcttatacttac | 23206 | 23219 | 2-10-2 | 563_1 | ATtcttatacttAC |
| 564 | gattcttatactta | 23207 | 23220 | 2-10-2 | 564_1 | GAttcttatactTA |
| 565 | tgattcttatactt | 23208 | 23221 | 2-10-2 | 565_1 | TGattcttatacTT |
| 566 | atgattcttatact | 23209 | 23222 | 2-10-2 | 566_1 | ATgattcttataCT |
| 567 | aacttcactaaaat | 23616 | 23629 | 2-10-2 | 567_1 | AActtcactaaaAT |
| 568 | aaacttcactaaaa | 23617 | 23630 | 2-10-2 | 568_1 | AAacttcactaaAA |
| 569 | taaacttcactaaa | 23618 | 23631 | 2-10-2 | 569_1 | TAaacttcactaAA |
| 570 | ataaacttcactaa | 23619 | 23632 | 2-10-2 | 570_1 | ATaaacttcactAA |
| 571 | aataaacttcacta | 23620 | 23633 | 2-10-2 | 571_1 | AAtaaacttcacTA |
| 572 | taataaacttcact | 23621 | 23634 | 2-10-2 | 572_1 | TAataaacttcaCT |
| 573 | ctaataaacttcac | 23622 | 23635 | 2-10-2 | 573_1 | CTaataaacttcAC |
| 574 | actaataaacttca | 23623 | 23636 | 2-10-2 | 574_1 | ACtaataaacttCA |
| 575 | aactaataaacttc | 23624 | 23637 | 2-10-2 | 575_1 | AActaataaactTC |
| 576 | aatcttctatttta | 24108 | 24121 | 2-10-2 | 576_1 | AAtcttctatttTA |
| 577 | caatcttctatttt | 24109 | 24122 | 2-10-2 | 577_1 | CAatcttctattTT |
| 578 | ccaatcttctattt | 24110 | 24123 | 2-10-2 | 578_1 | CCaatcttctatTT |
| 579 | accaatcttctatt | 24111 | 24124 | 2-10-2 | 579_1 | ACcaatcttctaTT |
| 580 | aaccaatcttctat | 24112 | 24125 | 2-10-2 | 580_1 | AAccaatcttctAT |
| 581 | caaccaatcttcta | 24113 | 24126 | 2-10-2 | 581_1 | CAaccaatcttcTA |
| 582 | gcaaccaatcttct | 24114 | 24127 | 2-10-2 | 582_1 | GCaaccaatcttCT |
| 583 | tgcaaccaatcttc | 24115 | 24128 | 2-10-2 | 583_1 | TGcaaccaatctTC |
| 584 | ctgcaaccaatctt | 24116 | 24129 | 2-10-2 | 584_1 | CTgcaaccaatcTT |
| 585 | actgcaaccaatct | 24117 | 24130 | 2-10-2 | 585_1 | ACtgcaaccaatCT |
| 586 | aactgcaaccaatc | 24118 | 24131 | 2-10-2 | 586_1 | AActgcaaccaaTC |
| 587 | taactgcaaccaat | 24119 | 24132 | 2-10-2 | 587_1 | TAactgcaaccaAT |
| 588 | tacaacacacatca | 24335 | 24348 | 2-10-2 | 588_1 | TAcaacacacatCA |
| 589 | atacaacacacatc | 24336 | 24349 | 2-10-2 | 589_1 | ATacaacacacaTC |
| 590 | aatacaacacacat | 24337 | 24350 | 2-10-2 | 590_1 | AAtacaacacacAT |
| 591 | gaatacaacacaca | 24338 | 24351 | 2-10-2 | 591_1 | GAatacaacacaCA |
| 592 | tgaatacaacacac | 24339 | 24352 | 2-10-2 | 592_1 | TGaatacaacacAC |
| 593 | atgaatacaacaca | 24340 | 24353 | 2-10-2 | 593_1 | ATgaatacaacaCA |
| 594 | cctaataaaatata | 24499 | 24512 | 2-10-2 | 594_1 | CCtaataaaataTA |
| 595 | tcctaataaaatat | 24500 | 24513 | 2-10-2 | 595_1 | TCctaataaaatAT |
| 596 | ctcctaataaaata | 24501 | 24514 | 2-10-2 | 596_1 | CTcctaataaaaTA |
| 597 | actcctaataaaat | 24502 | 24515 | 2-10-2 | 597_1 | ACtcctaataaaAT |
| 598 | tactcctaataaaa | 24503 | 24516 | 2-10-2 | 598_1 | TActcctaataaAA |
| 599 | ctactcctaataaa | 24504 | 24517 | 2-10-2 | 599_1 | CTactcctaataAA |
| 600 | actactcctaataa | 24505 | 24518 | 2-10-2 | 600_1 | ACtactcctaatAA |
| 601 | aactactcctaata | 24506 | 24519 | 2-10-2 | 601_1 | AActactcctaaTA |
| 602 | taactactcctaat | 24507 | 24520 | 2-10-2 | 602_1 | TAactactcctaAT |
| 603 | ataactactcctaa | 24508 | 24521 | 2-10-2 | 603_1 | ATaactactcctAA |
| 604 | tataactactccta | 24509 | 24522 | 2-10-2 | 604_1 | TAtaactactccTA |
| 605 | atataactactcct | 24510 | 24523 | 2-10-2 | 605_1 | ATataactactcCT |
| 606 | aatataactactcc | 24511 | 24524 | 2-10-2 | 606_1 | AAtataactactCC |
| 607 | aaatataactactc | 24512 | 24525 | 2-10-2 | 607_1 | AAatataactacTC |
| 608 | aaaatataactact | 24513 | 24526 | 2-10-2 | 608_1 | AAaatataactaCT |
| 609 | aaaaatataactac | 24514 | 24527 | 2-10-2 | 609_1 | AAaaatataactAC |
| 610 | taaaaatataacta | 24515 | 24528 | 2-10-2 | 610_1 | TAaaaatataacTA |
| 611 | gtaaaaatataact | 24516 | 24529 | 2-10-2 | 611_1 | GTaaaaatataaCT |
| 612 | agtaaaaatataac | 24517 | 24530 | 2-10-2 | 612_1 | AGtaaaaatataAC |
| 613 | actgatacccacaa | 24593 | 24606 | 2-10-2 | 613_1 | ACtgatacccacAA |
| 614 | aactgatacccaca | 24594 | 24607 | 2-10-2 | 614_1 | AActgatacccaCA |
| 615 | caactgatacccac | 24595 | 24608 | 2-10-2 | 615_1 | CAactgatacccAC |
| 616 | tcaactgataccca | 24596 | 24609 | 2-10-2 | 616_1 | TCaactgataccCA |
| 617 | atcactaaaaaact | 24752 | 24765 | 2-10-2 | 617_1 | ATcactaaaaaaCT |
| 618 | tatcactaaaaaac | 24753 | 24766 | 2-10-2 | 618_1 | TAtcactaaaaaAC |
| 619 | atatcactaaaaaa | 24754 | 24767 | 2-10-2 | 619_1 | ATatcactaaaaAA |
| 620 | tatatcactaaaaa | 24755 | 24768 | 2-10-2 | 620_1 | TAtatcactaaaAA |
| 621 | ttatatcactaaaa | 24756 | 24769 | 2-10-2 | 621_1 | TTatatcactaaAA |
| 622 | tttatatcactaaa | 24757 | 24770 | 2-10-2 | 622_1 | TTtatatcactaAA |
| 623 | gtttatatcactaa | 24758 | 24771 | 2-10-2 | 623_1 | GTttatatcactAA |
| 624 | aaacttttaattaa | 24850 | 24863 | 2-10-2 | 624_1 | AAacttttaattAA |
| 625 | caaacttttaatta | 24851 | 24864 | 2-10-2 | 625_1 | CAaacttttaatTA |
| 626 | tcaaacttttaatt | 24852 | 24865 | 2-10-2 | 626_1 | TCaaacttttaaTT |
| 627 | ttcaaacttttaat | 24853 | 24866 | 2-10-2 | 627_1 | TTcaaacttttaAT |
| 628 | cttcaaacttttaa | 24854 | 24867 | 2-10-2 | 628_1 | CTtcaaacttttAA |
| 629 | acttcaaactttta | 24855 | 24868 | 2-10-2 | 629_1 | ACttcaaactttTA |
| 630 | cacttcaaactttt | 24856 | 24869 | 2-10-2 | 630_1 | CActtcaaacttTT |
| 631 | ccacttcaaacttt | 24857 | 24870 | 2-10-2 | 631_1 | CCacttcaaactTT |
| 632 | cccacttcaaactt | 24858 | 24871 | 2-10-2 | 632_1 | CCcacttcaaacTT |
| 633 | acccacttcaaact | 24859 | 24872 | 2-10-2 | 633_1 | ACccacttcaaaCT |
| 634 | aacccacttcaaac | 24860 | 24873 | 2-10-2 | 634_1 | AAcccacttcaaAC |
| 635 | aaacccacttcaaa | 24861 | 24874 | 2-10-2 | 635_1 | AAacccacttcaAA |
| 636 | aaaacccacttcaa | 24862 | 24875 | 2-10-2 | 636_1 | AAaacccacttcAA |
| 637 | aaaaacccacttca | 24863 | 24876 | 2-10-2 | 637_1 | AAaaacccacttCA |
| 638 | aaaaaacccacttc | 24864 | 24877 | 2-10-2 | 638_1 | AAaaaacccactTC |
| 639 | caaaaaacccactt | 24865 | 24878 | 2-10-2 | 639_1 | CAaaaaacccacTT |
| 640 | acaaaaaacccact | 24866 | 24879 | 2-10-2 | 640_1 | ACaaaaaacccaCT |
| 641 | aacaaaaaacccac | 24867 | 24880 | 2-10-2 | 641_1 | AAcaaaaaacccAC |
| 642 | aaacaaaaaaccca | 24868 | 24881 | 2-10-2 | 642_1 | AAacaaaaaaccCA |
| 643 | aaaacaaaaaaccc | 24869 | 24882 | 2-10-2 | 643_1 | AAaacaaaaaacCC |
| 644 | atcttcccattaat | 24976 | 24989 | 2-10-2 | 644_1 | ATcttcccattaAT |
| 645 | aatcttcccattaa | 24977 | 24990 | 2-10-2 | 645_1 | AAtcttcccattAA |
| 646 | taatcttcccatta | 24978 | 24991 | 2-10-2 | 646_1 | TAatcttcccatTA |
| 647 | ataatcttcccatt | 24979 | 24992 | 2-10-2 | 647_1 | ATaatcttcccaTT |
| 648 | aataatcttcccat | 24980 | 24993 | 2-10-2 | 648_1 | AAtaatcttcccAT |
| 649 | aaataatcttccca | 24981 | 24994 | 2-10-2 | 649_1 | AAataatcttccCA |
| 650 | aaaataatcttccc | 24982 | 24995 | 2-10-2 | 650_1 | AAaataatcttcCC |
| 651 | tattaatcaaaaat | 25057 | 25070 | 2-10-2 | 651_1 | TAttaatcaaaaAT |
| 652 | ctattaatcaaaaa | 25058 | 25071 | 2-10-2 | 652_1 | CTattaatcaaaAA |
| 653 | tctattaatcaaaa | 25059 | 25072 | 2-10-2 | 653_1 | TCtattaatcaaAA |
| 654 | ctctattaatcaaa | 25060 | 25073 | 2-10-2 | 654_1 | CTctattaatcaAA |
| 655 | actctattaatcaa | 25061 | 25074 | 2-10-2 | 655_1 | ACtctattaatcAA |
| 656 | gactctattaatca | 25062 | 25075 | 2-10-2 | 656_1 | GActctattaatCA |
| 657 | tattctactcttct | 25433 | 25446 | 2-10-2 | 657_1 | TAttctactcttCT |
| 658 | atattctactcttc | 25434 | 25447 | 2-10-2 | 658_1 | ATattctactctTC |
| 659 | aatattctactctt | 25435 | 25448 | 2-10-2 | 659_1 | AAtattctactcTT |
| 660 | gaatattctactct | 25436 | 25449 | 2-10-2 | 660_1 | GAatattctactCT |
| 661 | agaatattctactc | 25437 | 25450 | 2-10-2 | 661_1 | AGaatattctacTC |
| 662 | atttaccaattcaa | 25508 | 25521 | 2-10-2 | 662_1 | ATttaccaattcAA |
| 663 | tatttaccaattca | 25509 | 25522 | 2-10-2 | 663_1 | TAtttaccaattCA |
| 664 | gtatttaccaattc | 25510 | 25523 | 2-10-2 | 664_1 | GTatttaccaatTC |
| 665 | tgtatttaccaatt | 25511 | 25524 | 2-10-2 | 665_1 | TGtatttaccaaTT |
| 666 | ctgtatttaccaat | 25512 | 25525 | 2-10-2 | 666_1 | CTgtatttaccaAT |
| 667 | actgtatttaccaa | 25513 | 25526 | 2-10-2 | 667_1 | ACtgtatttaccAA |
| 668 | ttataccatcaaat | 27100 | 27113 | 2-10-2 | 668_1 | TTataccatcaaAT |
| 669 | attataccatcaaa | 27101 | 27114 | 2-10-2 | 669_1 | ATtataccatcaAA |
| 670 | cattataccatcaa | 27102 | 27115 | 2-10-2 | 670_1 | CAttataccatcAA |
| 671 | tcattataccatca | 27103 | 27116 | 2-10-2 | 671_1 | TCattataccatCA |
| 672 | ttcattataccatc | 27104 | 27117 | 2-10-2 | 672_1 | TTcattataccaTC |
| 673 | cttcattataccat | 27105 | 27118 | 2-10-2 | 673_1 | CTtcattataccAT |
| 674 | tcttcattatacca | 27106 | 27119 | 2-10-2 | 674_1 | TCttcattatacCA |
| 675 | ttcttcattatacc | 27107 | 27120 | 2-10-2 | 675_1 | TTcttcattataCC |
| 676 | tttcttcattatac | 27108 | 27121 | 2-10-2 | 676_1 | TTtcttcattatAC |
| 677 | ttttcttcattata | 27109 | 27122 | 2-10-2 | 677_1 | TTttcttcattaTA |
| 678 | attttcttcattat | 27110 | 27123 | 2-10-2 | 678_1 | ATtttcttcattAT |
| 679 | tattttcttcatta | 27111 | 27124 | 2-10-2 | 679_1 | TAttttcttcatTA |
| 680 | atattttcttcatt | 27112 | 27125 | 2-10-2 | 680_1 | ATattttcttcaTT |
| 681 | aatattttcttcat | 27113 | 27126 | 2-10-2 | 681_1 | AAattttcttcaAT |
| 682 | aaatattttcttca | 27114 | 27127 | 2-10-2 | 682_1 | AAatattttcttCA |
| 683 | taaatattttcttc | 27115 | 27128 | 2-10-2 | 683_1 | TAaatattttctTC |
| 684 | aataatccaaactt | 27772 | 27785 | 2-10-2 | 684_1 | AAtaatccaaacTT |
| 685 | aaataatccaaact | 27773 | 27786 | 2-10-2 | 685_1 | AAataatccaaaCT |
| 686 | aaaataatccaaac | 27774 | 27787 | 2-10-2 | 686_1 | AAaataatccaaAC |
| 687 | caaaataatccaaa | 27775 | 27788 | 2-10-2 | 687_1 | CAaaataatccaAA |
| 688 | acaaaataatccaa | 27776 | 27789 | 2-10-2 | 688_1 | ACaaaataatccAA |
| 689 | tacaaaataatcca | 27777 | 27790 | 2-10-2 | 689_1 | TAcaaaataatcCA |
| 690 | ttacaaaataatcc | 27778 | 27791 | 2-10-2 | 690_1 | TTacaaaataatCC |
| 691 | gttacaaaataatc | 27779 | 27792 | 2-10-2 | 691_1 | GTtacaaaataaTC |
| 692 | tgttacaaaataat | 27780 | 27793 | 2-10-2 | 692_1 | TGttacaaaataAT |
| 693 | ttttacattaacta | 27935 | 27948 | 2-10-2 | 693_1 | TTttacattaacTA |
| 694 | tttttacattaact | 27936 | 27949 | 2-10-2 | 694_1 | TTtttacattaaCT |
| 695 | ttttttacattaac | 27937 | 27950 | 2-10-2 | 695_1 | TTttttacattaAC |
| 696 | attttttacattaa | 27938 | 27951 | 2-10-2 | 696_1 | ATtttttacattAA |
| 697 | tattttttacatta | 27939 | 27952 | 2-10-2 | 697_1 | TAttttttacatTA |
| 698 | ttattttttacatt | 27940 | 27953 | 2-10-2 | 698_1 | TTattttttacaTT |
| 699 | aaatactaacatca | 29299 | 29312 | 2-10-2 | 699_1 | AAatactaacatCA |
| 700 | aaaatactaacatc | 29300 | 29313 | 2-10-2 | 700_1 | AAaatactaacaTC |
| 701 | caaaatactaacat | 29301 | 29314 | 2-10-2 | 701_1 | CAaaatactaacAT |
| 702 | ccaaaatactaaca | 29302 | 29315 | 2-10-2 | 702_1 | CCaaaatactaaCA |
| 703 | gccaaaatactaac | 29303 | 29316 | 2-10-2 | 703_1 | GCcaaaatactaAC |
| 704 | tgccaaaatactaa | 29304 | 29317 | 2-10-2 | 704_1 | TGccaaaatactAA |
| 705 | tccattcattttat | 29415 | 29428 | 2-10-2 | 705_1 | TCcattcattttAT |
| 706 | atccattcatttta | 29416 | 29429 | 2-10-2 | 706_1 | ATccattcatttTA |
| 707 | catccattcatttt | 29417 | 29430 | 2-10-2 | 707_1 | CAtccattcattTT |
| 708 | acatccattcattt | 29418 | 29431 | 2-10-2 | 708_1 | ACatccattcatTT |
| 709 | cacatccattcatt | 29419 | 29432 | 2-10-2 | 709_1 | CAcatccattcaTT |
| 710 | ccacatccattcat | 29420 | 29433 | 2-10-2 | 710_1 | CCacatccattcAT |
| 711 | gccacatccattca | 29421 | 29434 | 2-10-2 | 711_1 | GCcacatccattCA |
| 712 | tgccacatccattc | 29422 | 29435 | 2-10-2 | 712_1 | TGccacatccatTC |
| 713 | atgccacatccatt | 29423 | 29436 | 2-10-2 | 713_1 | ATgccacatccaTT |
| 714 | tatgccacatccat | 29424 | 29437 | 2-10-2 | 714_1 | TAtgccacatccAT |
| 715 | ttatgccacatcca | 29425 | 29438 | 2-10-2 | 715_1 | TTatgccacatcCA |
| 716 | attatgccacatcc | 29426 | 29439 | 2-10-2 | 716_1 | ATtatgccacatCC |
| 717 | tcttaactcttctc | 30753 | 30766 | 2-10-2 | 717_1 | TCttaactcttcTC |
| 718 | ttcttaactcttct | 30754 | 30767 | 2-10-2 | 718_1 | TTcttaactcttCT |
| 719 | gttcttaactcttc | 30755 | 30768 | 2-10-2 | 719_1 | GTtcttaactctTC |
| 720 | agttcttaactctt | 30756 | 30769 | 2-10-2 | 720_1 | AGttcttaactcTT |
| 721 | tagttcttaactct | 30757 | 30770 | 2-10-2 | 721_1 | TAgttcttaactCT |
| 722 | caaatactcaaaaa | 31029 | 31042 | 2-10-2 | 722_1 | CAaatactcaaaAA |
| 723 | tcaaatactcaaaa | 31030 | 31043 | 2-10-2 | 723_1 | TCaaatactcaaAA |
| 724 | ttcaaatactcaaa | 31031 | 31044 | 2-10-2 | 724_1 | TTcaaatactcaAA |
| 725 | cttcaaatactcaa | 31032 | 31045 | 2-10-2 | 725_1 | CTtcaaatactcAA |
| 726 | gcttcaaatactca | 31033 | 31046 | 2-10-2 | 726_1 | GCttcaaatactCA |
| 727 | agcttcaaatactc | 31034 | 31047 | 2-10-2 | 727_1 | AGcttcaaatacTC |
| 728 | aagcttcaaatact | 31035 | 31048 | 2-10-2 | 728_1 | AAgcttcaaataCT |
| 729 | cctcattacccatt | 32059 | 32072 | 2-10-2 | 729_1 | CCtcattacccaTT |
| 730 | tcctcattacccat | 32060 | 32073 | 2-10-2 | 730_1 | TCctcattacccAT |
| 731 | atcctcattaccca | 32061 | 32074 | 2-10-2 | 731_1 | ATcctcattaccCA |
| 732 | tatcctcattaccc | 32062 | 32075 | 2-10-2 | 732_1 | TAtcctcattacCC |
| 733 | atatcctcattacc | 32063 | 32076 | 2-10-2 | 733_1 | ATatcctcattaCC |
| 734 | aatatcctcattac | 32064 | 32077 | 2-10-2 | 734_1 | AAtatcctcattAC |
| 735 | taatatcctcatta | 32065 | 32078 | 2-10-2 | 735_1 | TAatatcctcatTA |
| 736 | ttaatatcctcatt | 32066 | 32079 | 2-10-2 | 736_1 | TTaatatcctcaTT |
| 737 | tttaatatcctcat | 32067 | 32080 | 2-10-2 | 737_1 | TTtaatatcctcAT |
| 738 | atttaatatcctca | 32068 | 32081 | 2-10-2 | 738_1 | ATttaatatcctCA |
| 739 | aatttaatatcctc | 32069 | 32082 | 2-10-2 | 739_1 | AAtttaatatccTC |
| 740 | aaatttaatatcct | 32070 | 32083 | 2-10-2 | 740_1 | AAatttaatatcCT |
| 741 | taaatttaatatcc | 32071 | 32084 | 2-10-2 | 741_1 | TAaatttaatatCC |
| 742 | ttaaatttaatatc | 32072 | 32085 | 2-10-2 | 742_1 | TTaaatttaataTC |
| 743 | cttaaatttaatat | 32073 | 32086 | 2-10-2 | 743_1 | CTtaaatttaatAT |
| 744 | tcttaaatttaata | 32074 | 32087 | 2-10-2 | 744_1 | TCttaaatttaaTA |
| 745 | ttcttaaatttaat | 32075 | 32088 | 2-10-2 | 745_1 | TTcttaaatttaAT |
| 746 | gttcttaaatttaa | 32076 | 32089 | 2-10-2 | 746_1 | GTtcttaaatttAA |
| 747 | ttattctactttta | 33431 | 33444 | 2-10-2 | 747_1 | TTattctactttTA |
| 748 | tttattctactttt | 33432 | 33445 | 2-10-2 | 748_1 | TTtattctacttTT |
| 749 | ctttattctacttt | 33433 | 33446 | 2-10-2 | 749_1 | CTttattctactTT |
| 750 | cctttattctactt | 33434 | 33447 | 2-10-2 | 750_1 | CCtttattctacTT |
| 751 | gcctttattctact | 33435 | 33448 | 2-10-2 | 751_1 | GCctttattctaCT |
| 752 | aacaattattaata | 33797 | 33810 | 2-10-2 | 752_1 | AAcaattattaaTA |
| 753 | caacaattattaat | 33798 | 33811 | 2-10-2 | 753_1 | CAacaattattaAT |
| 754 | gcaacaattattaa | 33799 | 33812 | 2-10-2 | 754_1 | GCaacaattattAA |
| 755 | agcaacaattatta | 33800 | 33813 | 2-10-2 | 755_1 | AGcaacaattatTA |
| 756 | cagcaacaattatt | 33801 | 33814 | 2-10-2 | 756_1 | CAgcaacaattaTT |
| 757 | ccagcaacaattat | 33802 | 33815 | 2-10-2 | 757_1 | CCagcaacaattAT |
| 758 | accagcaacaatta | 33803 | 33816 | 2-10-2 | 758_1 | ACcagcaacaatTA |
| 759 | aaaccaaaacttac | 33963 | 33976 | 2-10-2 | 759_1 | AAaccaaaacttAC |
| 760 | aaaaccaaaactta | 33964 | 33977 | 2-10-2 | 760_1 | AAaaccaaaactTA |
| 761 | aaaaaccaaaactt | 33965 | 33978 | 2-10-2 | 761_1 | AAaaaccaaaacTT |
| 762 | caaaaaccaaaact | 33966 | 33979 | 2-10-2 | 762_1 | CAaaaaccaaaaCT |
| 763 | ccaaaaaccaaaac | 33967 | 33980 | 2-10-2 | 763_1 | CCaaaaaccaaaAC |
| 764 | accaaaaaccaaaa | 33968 | 33981 | 2-10-2 | 764_1 | ACcaaaaaccaaAA |
| 765 | aaccaaaaaccaaa | 33969 | 33982 | 2-10-2 | 765_1 | AAccaaaaaccaAA |
| 766 | aaaccaaaaaccaa | 33970 | 33983 | 2-10-2 | 766_1 | AAaccaaaaaccAA |
| 767 | atctaaaacacttc | 34050 | 34063 | 2-10-2 | 767_1 | ATctaaaacactTC |
| 768 | aatctaaaacactt | 34051 | 34064 | 2-10-2 | 768_1 | AAtctaaaacacTT |
| 769 | aaatctaaaacact | 34052 | 34065 | 2-10-2 | 769_1 | AAatctaaaacaCT |
| 770 | caaatctaaaacac | 34053 | 34066 | 2-10-2 | 770_1 | CAaatctaaaacAC |
| 771 | ccaaatctaaaaca | 34054 | 34067 | 2-10-2 | 771_1 | CCaaatctaaaaCA |
| 772 | cccaaatctaaaac | 34055 | 34068 | 2-10-2 | 772_1 | CCcaaatctaaaAC |
| 773 | ccccaaatctaaaa | 34056 | 34069 | 2-10-2 | 773_1 | CCccaaatctaaAA |
| 774 | accccaaatctaaa | 34057 | 34070 | 2-10-2 | 774_1 | ACcccaaatctaAA |
| 775 | aaccccaaatctaa | 34058 | 34071 | 2-10-2 | 775_1 | AAccccaaatctAA |
| 776 | aaaccccaaatcta | 34059 | 34072 | 2-10-2 | 776_1 | AAaccccaaatcTA |
| 777 | attcacaaatccta | 34075 | 34088 | 2-10-2 | 777_1 | ATtcacaaatccTA |
| 778 | tattcacaaatcct | 34076 | 34089 | 2-10-2 | 778_1 | TAttcacaaatcCT |
| 779 | atattcacaaatcc | 34077 | 34090 | 2-10-2 | 779_1 | ATattcacaaatCC |
| 780 | aatattcacaaatc | 34078 | 34091 | 2-10-2 | 780_1 | AAtattcacaaaTC |
| 781 | aaatattcacaaat | 34079 | 34092 | 2-10-2 | 781_1 | AAatattcacaaAT |
| 782 | caaatattcacaaa | 34080 | 34093 | 2-10-2 | 782_1 | CAaatattcacaAA |
| 783 | gcaaatattcacaa | 34081 | 34094 | 2-10-2 | 783_1 | GCaaatattcacAA |
| 784 | aacacacattatca | 34537 | 34550 | 2-10-2 | 784_1 | AAcacacattatCA |
| 785 | taacacacattatc | 34538 | 34551 | 2-10-2 | 785_1 | TAacacacattaTC |
| 786 | ttaacacacattat | 34539 | 34552 | 2-10-2 | 786_1 | TTaacacacattAT |
| 787 | tttaacacacatta | 34540 | 34553 | 2-10-2 | 787_1 | TTtaacacacatTA |
| 788 | atttaacacacatt | 34541 | 34554 | 2-10-2 | 788_1 | ATttaacacacaTT |
| 789 | tatttaacacacat | 34542 | 34555 | 2-10-2 | 789_1 | TAtttaacacacAT |
| 790 | ctatttaacacaca | 34543 | 34556 | 2-10-2 | 790_1 | CTatttaacacaCA |
| 791 | actatttaacacac | 34544 | 34557 | 2-10-2 | 791_1 | ACtatttaacacAC |
| 792 | tactatttaacaca | 34545 | 34558 | 2-10-2 | 792_1 | TActatttaacaCA |
| 793 | ctactatttaacac | 34546 | 34559 | 2-10-2 | 793_1 | CTactatttaacAC |
| 794 | actactatttaaca | 34547 | 34560 | 2-10-2 | 794_1 | ACtactatttaaCA |
| 795 | aactactatttaac | 34548 | 34561 | 2-10-2 | 795_1 | AActactatttaAC |
| 796 | aaactactatttaa | 34549 | 34562 | 2-10-2 | 796_1 | AAactactatttAA |
| 797 | aaaactactattta | 34550 | 34563 | 2-10-2 | 797_1 | AAaactactattTA |
| 798 | gaaaactactattt | 34551 | 34564 | 2-10-2 | 798_1 | GAaaactactatTT |
| 799 | tgaaaactactatt | 34552 | 34565 | 2-10-2 | 799_1 | TGaaaactactaTT |
| 800 | aaataacctatcat | 35309 | 35322 | 2-10-2 | 800_1 | AAataacctatcAT |
| 801 | aaaataacctatca | 35310 | 35323 | 2-10-2 | 801_1 | AAaataacctatCA |
| 802 | caaaataacctatc | 35311 | 35324 | 2-10-2 | 802_1 | CAaaataacctaTC |
| 803 | acaaaataacctat | 35312 | 35325 | 2-10-2 | 803_1 | ACaaaataacctAT |
| 804 | cacaaaataaccta | 35313 | 35326 | 2-10-2 | 804_1 | CAcaaaataaccTA |
| 805 | tcacaaaataacct | 35314 | 35327 | 2-10-2 | 805_1 | TCacaaaataacCT |
| 806 | atcacaaaataacc | 35315 | 35328 | 2-10-2 | 806_1 | ATcacaaaataaCC |
| 807 | catcacaaaataac | 35316 | 35329 | 2-10-2 | 807_1 | CAtcacaaaataAC |
| 808 | tcatcacaaaataa | 35317 | 35330 | 2-10-2 | 808_1 | TCatcacaaaatAA |
| 809 | ttcatcacaaaata | 35318 | 35331 | 2-10-2 | 809_1 | TTcatcacaaaaTA |
| 810 | tttcatcacaaaat | 35319 | 35332 | 2-10-2 | 810_1 | TTtcatcacaaaAT |
| 811 | ttttcatcacaaaa | 35320 | 35333 | 2-10-2 | 811_1 | TTttcatcacaaAA |
| 812 | attttcatcacaaa | 35321 | 35334 | 2-10-2 | 812_1 | ATtttcatcacaAA |
| 813 | tattttcatcacaa | 35322 | 35335 | 2-10-2 | 813_1 | TAttttcatcacAA |
| 814 | gtattttcatcaca | 35323 | 35336 | 2-10-2 | 814_1 | GTattttcatcaCA |
| 815 | atttaaatttatca | 35354 | 35367 | 2-10-2 | 815_1 | ATttaaatttatCA |
| 816 | aatttaaatttatc | 35355 | 35368 | 2-10-2 | 816_1 | AAtttaaatttaTC |
| 817 | aaatttaaatttat | 35356 | 35369 | 2-10-2 | 817_1 | AAatttaaatttAT |
| 818 | aaaatttaaattta | 35357 | 35370 | 2-10-2 | 818_1 | AAaatttaaattTA |
| 819 | taaaatttaaattt | 35358 | 35371 | 2-10-2 | 819_1 | TAaaatttaaatTT |
| 820 | ataaaatttaaatt | 35359 | 35372 | 2-10-2 | 820_1 | ATaaaatttaaaTT |
| 821 | cataaaatttaaat | 35360 | 35373 | 2-10-2 | 821_1 | CAtaaaatttaaAT |
| 822 | acataaaatttaaa | 35361 | 35374 | 2-10-2 | 822_1 | ACataaaatttaAA |
| 823 | ctactaatattcat | 36332 | 36345 | 2-10-2 | 823_1 | CTactaatattcAT |
| 824 | cctactaatattca | 36333 | 36346 | 2-10-2 | 824_1 | CCtactaatattCA |
| 825 | acctactaatattc | 36334 | 36347 | 2-10-2 | 825_1 | ACctactaatatTC |
| 826 | cacctactaatatt | 36335 | 36348 | 2-10-2 | 826_1 | CAcctactaataTT |
| 827 | tcacctactaatat | 36336 | 36349 | 2-10-2 | 827_1 | TCacctactaatAT |
| 828 | ttcacctactaata | 36337 | 36350 | 2-10-2 | 828_1 | TTcacctactaaTA |
| 829 | tttcacctactaat | 36338 | 36351 | 2-10-2 | 829_1 | TTtcacctactaAT |
| 830 | ttttcacctactaa | 36339 | 36352 | 2-10-2 | 830_1 | TTttcacctactAA |
| 831 | tttttcacctacta | 36340 | 36353 | 2-10-2 | 831_1 | TTtttcacctacTA |
| 832 | atttttcacctact | 36341 | 36354 | 2-10-2 | 832_1 | ATttttcacctaCT |
| 833 | tatttttcacctac | 36342 | 36355 | 2-10-2 | 833_1 | TAtttttcacctAC |
| 834 | ttatttttcaccta | 36343 | 36356 | 2-10-2 | 834_1 | TTatttttcaccTA |
| 835 | tttatttttcacct | 36344 | 36357 | 2-10-2 | 835_1 | TTtatttttcacCT |
| 836 | ttctactactaatt | 36468 | 36481 | 2-10-2 | 836_1 | TTctactactaaTT |
| 837 | cttctactactaat | 36469 | 36482 | 2-10-2 | 837_1 | CTtctactactaAT |
| 838 | acttctactactaa | 36470 | 36483 | 2-10-2 | 838_1 | ACttctactactAA |
| 839 | aacttctactacta | 36471 | 36484 | 2-10-2 | 839_1 | AActtctactacTA |
| 840 | caacttctactact | 36472 | 36485 | 2-10-2 | 840_1 | CAacttctactaCT |
| 841 | tcaacttctactac | 36473 | 36486 | 2-10-2 | 841_1 | TCaacttctactAC |
| 842 | ctcaacttctacta | 36474 | 36487 | 2-10-2 | 842_1 | CTcaacttctacTA |
| 843 | tctcaacttctact | 36475 | 36488 | 2-10-2 | 843_1 | TCtcaacttctaCT |
| 844 | ctctcaacttctac | 36476 | 36489 | 2-10-2 | 844_1 | CTctcaacttctAC |
| 845 | tctctcaacttcta | 36477 | 36490 | 2-10-2 | 845_1 | TCtctcaacttcTA |
| 846 | ttctctcaacttct | 36478 | 36491 | 2-10-2 | 846_1 | TTctctcaacttCT |
| 847 | tttctctcaacttc | 36479 | 36492 | 2-10-2 | 847_1 | TTtctctcaactTC |
| 848 | ttttctctcaactt | 36480 | 36493 | 2-10-2 | 848_1 | TTttctctcaacTT |
| 849 | tttttctctcaact | 36481 | 36494 | 2-10-2 | 849_1 | TTtttctctcaaCT |
| 850 | ctttttctctcaac | 36482 | 36495 | 2-10-2 | 850_1 | CTttttctctcaAC |
| 851 | actttttctctcaa | 36483 | 36496 | 2-10-2 | 851_1 | ACtttttctctcAA |
| 852 | tactttttctctca | 36484 | 36497 | 2-10-2 | 852_1 | TActttttctctCA |
| 853 | ttactttttctctc | 36485 | 36498 | 2-10-2 | 853_1 | TTactttttctcTC |
| 854 | gttactttttctct | 36486 | 36499 | 2-10-2 | 854_1 | GTtactttttctCT |
| 855 | agttactttttctc | 36487 | 36500 | 2-10-2 | 855_1 | AGttac11111cTC |
| 856 | cattcccattaaca | 36788 | 36801 | 2-10-2 | 856_1 | CAttcccattaaCA |
| 857 | acattcccattaac | 36789 | 36802 | 2-10-2 | 857_1 | ACattcccattaAC |
| 858 | tacattcccattaa | 36790 | 36803 | 2-10-2 | 858_1 | TAcattcccattAA |
| 859 | ttacattcccatta | 36791 | 36804 | 2-10-2 | 859_1 | TTacattcccatTA |
| 860 | tttacattcccatt | 36792 | 36805 | 2-10-2 | 860_1 | TTtacattcccaTT |
| 861 | ttttacattcccat | 36793 | 36806 | 2-10-2 | 861_1 | TTttacattcccAT |
| 862 | cttttacattccca | 36794 | 36807 | 2-10-2 | 862_1 | CTtttacattccCA |
| 863 | acttttacattccc | 36795 | 36808 | 2-10-2 | 863_1 | ACttttacattcCC |
| 864 | cacttttacattcc | 36796 | 36809 | 2-10-2 | 864_1 | CActtttacattCC |
| 865 | acacttttacattc | 36797 | 36810 | 2-10-2 | 865_1 | ACacttttacatTC |
| 866 | tacacttttacatt | 36798 | 36811 | 2-10-2 | 866_1 | TAcacttttacaTT |
| 867 | gtacacttttacat | 36799 | 36812 | 2-10-2 | 867_1 | GTacacttttacAT |
| 868 | tgtacacttttaca | 36800 | 36813 | 2-10-2 | 868_1 | TGtacacttttaCA |
| 869 | tttatcaaaaaaat | 36834 | 36847 | 2-10-2 | 869_1 | TTtatcaaaaaaAT |
| 870 | atttatcaaaaaaa | 36835 | 36848 | 2-10-2 | 870_1 | ATttatcaaaaaAA |
| 871 | catttatcaaaaaa | 36836 | 36849 | 2-10-2 | 871_1 | CAtttatcaaaaAA |
| 872 | acatttatcaaaaa | 36837 | 36850 | 2-10-2 | 872_1 | ACatttatcaaaAA |
| 873 | tacatttatcaaaa | 36838 | 36851 | 2-10-2 | 873_1 | TAcatttatcaaAA |
| 874 | atacatttatcaaa | 36839 | 36852 | 2-10-2 | 874_1 | ATacatttatcaAA |
| 875 | tatacatttatcaa | 36840 | 36853 | 2-10-2 | 875_1 | TAtacatttatcAA |
| 876 | acatcttccaattt | 38848 | 38861 | 2-10-2 | 876_1 | ACatcttccaatTT |
| 877 | tacatcttccaatt | 38849 | 38862 | 2-10-2 | 877_1 | TAcatcttccaaTT |
| 878 | ttacatcttccaat | 38850 | 38863 | 2-10-2 | 878_1 | TTacatcttccaAT |
| 879 | tttacatcttccaa | 38851 | 38864 | 2-10-2 | 879_1 | TTtacatcttccAA |
| 880 | atttacatcttcca | 38852 | 38865 | 2-10-2 | 880_1 | ATttacatcttcCA |
| 881 | tatttacatcttcc | 38853 | 38866 | 2-10-2 | 881_1 | TAtttacatcttCC |
| 882 | ttatttacatcttc | 38854 | 38867 | 2-10-2 | 882_1 | TTatttacatctTC |
| 883 | cttatttacatctt | 38855 | 38868 | 2-10-2 | 883_1 | CTtatttacatcTT |
| 884 | tcttatttacatct | 38856 | 38869 | 2-10-2 | 884_1 | TCttatttacatCT |
| 885 | atcttatttacatc | 38857 | 38870 | 2-10-2 | 885_1 | ATcttatttacaTC |
| 886 | aatcttatttacat | 38858 | 38871 | 2-10-2 | 886_1 | AAtcttatttacAT |
| 887 | gaatcttatttaca | 38859 | 38872 | 2-10-2 | 887_1 | GAatcttatttaCA |
| 888 | tgaatcttatttac | 38860 | 38873 | 2-10-2 | 888_1 | TGaatcttatttAC |
| 889 | ttcccttcactcct | 40071 | 40084 | 2-10-2 | 889_1 | TTcccttcactcCT |
| 890 | tttcccttcactcc | 40072 | 40085 | 2-10-2 | 890_1 | TTtcccttcactCC |
| 891 | ttttcccttcactc | 40073 | 40086 | 2-10-2 | 891_1 | TTttcccttcacTC |
| 892 | attttcccttcact | 40074 | 40087 | 2-10-2 | 892_1 | ATtttcccttcaCT |
| 893 | aattttcccttcac | 40075 | 40088 | 2-10-2 | 893_1 | AAttttcccttcAC |
| 894 | taattttcccttca | 40076 | 40089 | 2-10-2 | 894_1 | TAattttcccttCA |
| 895 | ttaattttcccttc | 40077 | 40090 | 2-10-2 | 895_1 | TTaattttccctTC |
| 896 | gttaattttccctt | 40078 | 40091 | 2-10-2 | 896_1 | GTtaattttcccTT |
| 897 | tttatcatttcttt | 40150 | 40163 | 2-10-2 | 897_1 | TTtatcatttctTT |
| 898 | ttttatcatttctt | 40151 | 40164 | 2-10-2 | 898_1 | TTttatcatttcTT |
| 899 | cttttatcatttct | 40152 | 40165 | 2-10-2 | 899_1 | CTtttatcatttCT |
| 900 | tcttttatcatttc | 40153 | 40166 | 2-10-2 | 900_1 | TCttttatcattTC |
| 901 | ttcttttatcattt | 40154 | 40167 | 2-10-2 | 901_1 | TTcttttatcatTT |
| 902 | cttcttttatcatt | 40155 | 40168 | 2-10-2 | 902_1 | CTtcttttatcaTT |
| 903 | acttcttttatcat | 40156 | 40169 | 2-10-2 | 903_1 | ACttcttttatcAT |
| 904 | tacttcttttatca | 40157 | 40170 | 2-10-2 | 904_1 | TActtcttttatCA |
| 905 | ttacttcttttatc | 40158 | 40171 | 2-10-2 | 905_1 | TTacttcttttaTC |
| 906 | attacttcttttat | 40159 | 40172 | 2-10-2 | 906_1 | ATtacttcttttAT |
| 907 | aattacttctttta | 40160 | 40173 | 2-10-2 | 907_1 | AAttacttctttTA |
| 908 | aaattacttctttt | 40161 | 40174 | 2-10-2 | 908_1 | AAattacttcttTT |
| 909 | aaaattacttcttt | 40162 | 40175 | 2-10-2 | 909_1 | AAaattacttctTT |
| 910 | caaaattacttctt | 40163 | 40176 | 2-10-2 | 910_1 | CAaaattacttcTT |
| 911 | ccaaaattacttct | 40164 | 40177 | 2-10-2 | 911_1 | CCaaaattacttCT |
| 912 | tccaaaattacttc | 40165 | 40178 | 2-10-2 | 912_1 | TCcaaaattactTC |
| 913 | ttccaaaattactt | 40166 | 40179 | 2-10-2 | 913_1 | TTccaaaattacTT |
| 914 | gttccaaaattact | 40167 | 40180 | 2-10-2 | 914_1 | GTtccaaaattaCT |
| 915 | tgttccaaaattac | 40168 | 40181 | 2-10-2 | 915_1 | TGttccaaaattAC |
| 916 | atgttccaaaatta | 40169 | 40182 | 2-10-2 | 916_1 | ATgttccaaaatTA |
| 917 | ttactctttttatt | 40201 | 40214 | 2-10-2 | 917_1 | TTactctttttaTT |
| 918 | tttactctttttat | 40202 | 40215 | 2-10-2 | 918_1 | TTtactctttttAT |
| 919 | ttttactcttttta | 40203 | 40216 | 2-10-2 | 919_1 | TTttactcttttTA |
| 920 | attttactcttttt | 40204 | 40217 | 2-10-2 | 920_1 | ATtttactctttTT |
| 921 | tattttactctttt | 40205 | 40218 | 2-10-2 | 921_1 | TAttttactcttTT |
| 922 | atattttactcttt | 40206 | 40219 | 2-10-2 | 922_1 | ATattttactctTT |
| 923 | catattttactctt | 40207 | 40220 | 2-10-2 | 923_1 | CAtattttactcTT |
| 924 | ccatattttactct | 40208 | 40221 | 2-10-2 | 924_1 | CCatattttactCT |
| 925 | cccatattttactc | 40209 | 40222 | 2-10-2 | 925_1 | CCcatattttacTC |
| 926 | acccatattttact | 40210 | 40223 | 2-10-2 | 926_1 | ACccatattttaCT |
| 927 | tacccatattttac | 40211 | 40224 | 2-10-2 | 927_1 | TAcccatattttAC |
| 928 | ttacccatatttta | 40212 | 40225 | 2-10-2 | 928_1 | TTacccatatttTA |
| 929 | tttacccatatttt | 40213 | 40226 | 2-10-2 | 929_1 | TTtacccatattTT |
| 930 | gtttacccatattt | 40214 | 40227 | 2-10-2 | 930_1 | GTttacccatatTT |
| 931 | tgtttacccatatt | 40215 | 40228 | 2-10-2 | 931_1 | TGtttacccataTT |
| 932 | gttacctcccttta | 40368 | 40381 | 2-10-2 | 932_1 | GTtacctcccttTA |
| 933 | ggttacctcccttt | 40369 | 40382 | 2-10-2 | 933_1 | GGttacctccctTT |
| 934 | aggttacctccctt | 40370 | 40383 | 2-10-2 | 934_1 | AGgttacctcccTT |
| 935 | caaactaaaaccta | 41659 | 41672 | 2-10-2 | 935_1 | CAaactaaaaccTA |
| 936 | tcaaactaaaacct | 41660 | 41673 | 2-10-2 | 936_1 | TCaaactaaaacCT |
| 937 | atcaaactaaaacc | 41661 | 41674 | 2-10-2 | 937_1 | ATcaaactaaaaCC |
| 938 | gatcaaactaaaac | 41662 | 41675 | 2-10-2 | 938_1 | GAtcaaactaaaAC |
| 939 | agatcaaactaaaa | 41663 | 41676 | 2-10-2 | 939_1 | AGatcaaactaaAA |
| 940 | aagatcaaactaaa | 41664 | 41677 | 2-10-2 | 940_1 | AAgatcaaactaAA |
| 941 | ccaatttcacccaa | 41699 | 41712 | 2-10-2 | 941_1 | CCaatttcacccAA |
| 942 | cccaatttcaccca | 41700 | 41713 | 2-10-2 | 942_1 | CCcaatttcaccCA |
| 943 | gcccaatttcaccc | 41701 | 41714 | 2-10-2 | 943_1 | GCccaatttcacCC |
| 944 | tgcccaatttcacc | 41702 | 41715 | 2-10-2 | 944_1 | TGcccaatttcaCC |
| 945 | ttgcccaatttcac | 41703 | 41716 | 2-10-2 | 945_1 | TTgcccaatttcAC |
| 946 | caactttctatttt | 41777 | 41790 | 2-10-2 | 946_1 | CAactttctattTT |
| 947 | ccaactttctattt | 41778 | 41791 | 2-10-2 | 947_1 | CCaactttctatTT |
| 948 | cccaactttctatt | 41779 | 41792 | 2-10-2 | 948_1 | CCcaactttctaTT |
| 949 | acccaactttctat | 41780 | 41793 | 2-10-2 | 949_1 | ACccaactttctAT |
| 950 | aacccaactttcta | 41781 | 41794 | 2-10-2 | 950_1 | AAcccaactttcTA |
| 951 | aaacccaactttct | 41782 | 41795 | 2-10-2 | 951_1 | AAacccaactttCT |
| 952 | aaaacccaactttc | 41783 | 41796 | 2-10-2 | 952_1 | AAaacccaacttTC |
| 953 | aaaaacccaacttt | 41784 | 41797 | 2-10-2 | 953_1 | AAaaacccaactTT |
| 954 | caaaaacccaactt | 41785 | 41798 | 2-10-2 | 954_1 | CAaaaacccaacTT |
| 955 | acaaaaacccaact | 41786 | 41799 | 2-10-2 | 955_1 | ACaaaaacccaaCT |
| 956 | ctttaaaatttcca | 42170 | 42183 | 2-10-2 | 956_1 | CTttaaaatttcCA |
| 957 | tctttaaaatttcc | 42171 | 42184 | 2-10-2 | 957_1 | TCtttaaaatttCC |
| 958 | ttctttaaaatttc | 42172 | 42185 | 2-10-2 | 958_1 | TTctttaaaattTC |
| 959 | tttctttaaaattt | 42173 | 42186 | 2-10-2 | 959_1 | TTtctttaaaatTT |
| 960 | atttctttaaaatt | 42174 | 42187 | 2-10-2 | 960_1 | ATttctttaaaaTT |
| 961 | catttctttaaaat | 42175 | 42188 | 2-10-2 | 961_1 | CAtttctttaaaAT |
| 962 | acatttctttaaaa | 42176 | 42189 | 2-10-2 | 962_1 | ACatttctttaaAA |
| 963 | cacatttctttaaa | 42177 | 42190 | 2-10-2 | 963_1 | CAcatttctttaAA |
| 964 | ccacatttctttaa | 42178 | 42191 | 2-10-2 | 964_1 | CCacatttctttAA |
| 965 | accacatttcttta | 42179 | 42192 | 2-10-2 | 965_1 | ACcacatttcttTA |
| 966 | aaccacatttcttt | 42180 | 42193 | 2-10-2 | 966_1 | AAccacatttctTT |
| 967 | aaaccacatttctt | 42181 | 42194 | 2-10-2 | 967_1 | AAaccacatttcTT |
| 968 | aaaaccacatttct | 42182 | 42195 | 2-10-2 | 968_1 | AAaaccacatttCT |
| 969 | caaaaccacatttc | 42183 | 42196 | 2-10-2 | 969_1 | CAaaaccacattTC |
| 970 | ttcttctcttttca | 43831 | 43844 | 2-10-2 | 970_1 | TTcttctcttttCA |
| 971 | tttcttctcttttc | 43832 | 43845 | 2-10-2 | 971_1 | TTtcttctctttTC |
| 972 | ttttcttctctttt | 43833 | 43846 | 2-10-2 | 972_1 | TTttcttctcttTT |
| 973 | tttttcttctcttt | 43834 | 43847 | 2-10-2 | 973_1 | TTtttcttctctTT |
| 974 | ttttttcttctctt | 43835 | 43848 | 2-10-2 | 974_1 | TTttttcttctcTT |
| 975 | attttttcttctct | 43836 | 43849 | 2-10-2 | 975_1 | ATtttttcttctCT |
| 976 | tattttttcttctc | 43837 | 43850 | 2-10-2 | 976_1 | TAttttttcttcTC |
| 977 | aacttaatattaaa | 45488 | 45501 | 2-10-2 | 977_1 | AActtaatattaAA |
| 978 | caacttaatattaa | 45489 | 45502 | 2-10-2 | 978_1 | CAacttaatattAA |
| 979 | tcaacttaatatta | 45490 | 45503 | 2-10-2 | 979_1 | TCaacttaatatTA |
| 980 | ttcaacttaatatt | 45491 | 45504 | 2-10-2 | 980_1 | TTcaacttaataTT |
| 981 | attcaacttaatat | 45492 | 45505 | 2-10-2 | 981_1 | ATtcaacttaatAT |
| 982 | tattcaacttaata | 45493 | 45506 | 2-10-2 | 982_1 | TAttcaacttaaTA |
| 983 | ttattcaacttaat | 45494 | 45507 | 2-10-2 | 983_1 | TTattcaacttaAT |
| 984 | tttattcaacttaa | 45495 | 45508 | 2-10-2 | 984_1 | TTtattcaacttAA |
| 985 | caaattaaaaaaca | 47397 | 47410 | 2-10-2 | 985_1 | CAaattaaaaaaCA |
| 986 | tcaaattaaaaaac | 47398 | 47411 | 2-10-2 | 986_1 | TCaaattaaaaaAC |
| 987 | ttcaaattaaaaaa | 47399 | 47412 | 2-10-2 | 987_1 | TTcaaattaaaaAA |
| 988 | cttcaaattaaaaa | 47400 | 47413 | 2-10-2 | 988_1 | CTtcaaattaaaAA |
| 989 | tcttcaaattaaaa | 47401 | 47414 | 2-10-2 | 989_1 | TCttcaaattaaAA |
| 990 | ttcttcaaattaaa | 47402 | 47415 | 2-10-2 | 990_1 | TTcttcaaattaAA |
| 991 | tttcttcaaattaa | 47403 | 47416 | 2-10-2 | 991_1 | TTtcttcaaattAA |
| 992 | aacacaaattcaaa | 48077 | 48090 | 2-10-2 | 992_1 | AAcacaaattcaAA |
| 993 | aaacacaaattcaa | 48078 | 48091 | 2-10-2 | 993_1 | AAacacaaattcAA |
| 994 | taaacacaaattca | 48079 | 48092 | 2-10-2 | 994_1 | TAaacacaaattCA |
| 995 | ataaacacaaattc | 48080 | 48093 | 2-10-2 | 995_1 | ATaaacacaaatTC |
| 996 | aataaacacaaatt | 48081 | 48094 | 2-10-2 | 996_1 | AAtaaacacaaaTT |
| 997 | caataaacacaaat | 48082 | 48095 | 2-10-2 | 997_1 | CAataaacacaaAT |
| 998 | acaataaacacaaa | 48083 | 48096 | 2-10-2 | 998_1 | ACaataaacacaAA |
| 999 | aacaataaacacaa | 48084 | 48097 | 2-10-2 | 999_1 | AAcaataaacacAA |
| 1000 | taacaataaacaca | 48085 | 48098 | 2-10-2 | 1000_1 | TAacaataaacaCA |
| 1001 | ttaacaataaacac | 48086 | 48099 | 2-10-2 | 1001_1 | TTaacaataaacAC |
| 1002 | attaacaataaaca | 48087 | 48100 | 2-10-2 | 1002_1 | ATtaacaataaaCA |
| 1003 | aattaacaataaac | 48088 | 48101 | 2-10-2 | 1003_1 | AAttaacaataaAC |
| 1004 | gaattaacaataaa | 48089 | 48102 | 2-10-2 | 1004_1 | GAattaacaataAA |
| 1005 | tgaattaacaataa | 48090 | 48103 | 2-10-2 | 1005_1 | TGaattaacaatAA |
| 1006 | atattcctcaatca | 48905 | 48918 | 2-10-2 | 1006_1 | ATattcctcaatCA |
| 1007 | tatattcctcaatc | 48906 | 48919 | 2-10-2 | 1007_1 | TAtattcctcaaTC |
| 1008 | atatattcctcaat | 48907 | 48920 | 2-10-2 | 1008_1 | ATatattcctcaAT |
| 1009 | aatatattcctcaa | 48908 | 48921 | 2-10-2 | 1009_1 | AAtatattcctcAA |
| 1010 | caatatattcctca | 48909 | 48922 | 2-10-2 | 1010_1 | CAatatattcctCA |
| 1011 | acaatatattcctc | 48910 | 48923 | 2-10-2 | 1011_1 | ACaatatattccTC |
| 1012 | gacaatatattcct | 48911 | 48924 | 2-10-2 | 1012_1 | GAcaatatattcCT |
| 1013 | caatcctaattaaa | 48960 | 48973 | 2-10-2 | 1013_1 | CAatcctaattaAA |
| 1014 | ccaatcctaattaa | 48961 | 48974 | 2-10-2 | 1014_1 | CCaatcctaattAA |
| 1015 | cccaatcctaatta | 48962 | 48975 | 2-10-2 | 1015_1 | CCcaatcctaatTA |
| 1016 | gcccaatcctaatt | 48963 | 48976 | 2-10-2 | 1016_1 | GCccaatcctaaTT |
| 1017 | tgcccaatcctaat | 48964 | 48977 | 2-10-2 | 1017_1 | TGcccaatcctaAT |
| 1018 | accctacaaatact | 50093 | 50106 | 2-10-2 | 1018_1 | ACcctacaaataCT |
| 1019 | aaccctacaaatac | 50094 | 50107 | 2-10-2 | 1019_1 | AAccctacaaatAC |
| 1020 | aaaccctacaaata | 50095 | 50108 | 2-10-2 | 1020_1 | AAaccctacaaaTA |
| 1021 | aaaaccctacaaat | 50096 | 50109 | 2-10-2 | 1021_1 | AAaaccctacaaAT |
| 1022 | aaaaaccctacaaa | 50097 | 50110 | 2-10-2 | 1022_1 | AAaaaccctacaAA |
| 1023 | aaaaaaccctacaa | 50098 | 50111 | 2-10-2 | 1023_1 | AAaaaaccctacAA |
| 1024 | aaaaaaaccctaca | 50099 | 50112 | 2-10-2 | 1024_1 | AAaaaaaccctaCA |
| 1025 | tatacactattaat | 51008 | 51021 | 2-10-2 | 1025_1 | TAtacactattaAT |
| 1026 | ttatacactattaa | 51009 | 51022 | 2-10-2 | 1026_1 | TTatacactattAA |
| 1027 | attatacactatta | 51010 | 51023 | 2-10-2 | 1027_1 | ATtatacactatTA |
| 1028 | aattatacactatt | 51011 | 51024 | 2-10-2 | 1028_1 | AAttatacactaTT |
| 1029 | gaattatacactat | 51012 | 51025 | 2-10-2 | 1029_1 | GAattatacactAT |
| 1030 | gtaacaattataca | 51866 | 51879 | 2-10-2 | 1030_1 | GTaacaattataCA |
| 1031 | tgtaacaattatac | 51867 | 51880 | 2-10-2 | 1031_1 | TGtaacaattatAC |
| 1032 | ctgtaacaattata | 51868 | 51881 | 2-10-2 | 1032_1 | CTgtaacaattaTA |
| 1033 | cctgtaacaattat | 51869 | 51882 | 2-10-2 | 1033_1 | CCtgtaacaattAT |
| 1034 | tcctgtaacaatta | 51870 | 51883 | 2-10-2 | 1034_1 | TCctgtaacaatTA |
| 1035 | ataaaaaccacctt | 53263 | 53276 | 2-10-2 | 1035_1 | ATaaaaaccaccTT |
| 1036 | aataaaaaccacct | 53264 | 53277 | 2-10-2 | 1036_1 | AAtaaaaaccacCT |
| 1037 | gaataaaaaccacc | 53265 | 53278 | 2-10-2 | 1037_1 | GAataaaaaccaCC |
| 1038 | agaataaaaaccac | 53266 | 53279 | 2-10-2 | 1038_1 | AGaataaaaaccAC |
| 1039 | cagaataaaaacca | 53267 | 53280 | 2-10-2 | 1039_1 | CAgaataaaaacCA |
| 1040 | ccagaataaaaacc | 53268 | 53281 | 2-10-2 | 1040_1 | CCagaataaaaaCC |
| 1041 | cccagaataaaaac | 53269 | 53282 | 2-10-2 | 1041_1 | CCcagaataaaaAC |
| 1042 | acccagaataaaaa | 53270 | 53283 | 2-10-2 | 1042_1 | ACccagaataaaAA |
| 1043 | tttcttactcccct | 53699 | 53712 | 2-10-2 | 1043_1 | TTtcttactcccCT |
| 1044 | ctttcttactcccc | 53700 | 53713 | 2-10-2 | 1044_1 | CTttcttactccCC |
| 1045 | actttcttactccc | 53701 | 53714 | 2-10-2 | 1045_1 | ACtttcttactcCC |
| 1046 | cactttcttactcc | 53702 | 53715 | 2-10-2 | 1046_1 | CActttcttactCC |
| 1047 | ccactttcttactc | 53703 | 53716 | 2-10-2 | 1047_1 | CCactttcttacTC |
| 1048 | cctttaccactttt | 53948 | 53961 | 2-10-2 | 1048_1 | CCtttaccacttTT |
| 1049 | ccctttaccacttt | 53949 | 53962 | 2-10-2 | 1049_1 | CCctttaccactTT |
| 1050 | tccctttaccactt | 53950 | 53963 | 2-10-2 | 1050_1 | TCcctttaccacTT |
| 1051 | atccctttaccact | 53951 | 53964 | 2-10-2 | 1051_1 | ATccctttaccaCT |
| 1052 | catccctttaccac | 53952 | 53965 | 2-10-2 | 1052_1 | CAtccctttaccAC |
| 1053 | ctacatctaacccc | 54550 | 54563 | 2-10-2 | 1053_1 | CTacatctaaccCC |
| 1054 | tctacatctaaccc | 54551 | 54564 | 2-10-2 | 1054_1 | TCtacatctaacCC |
| 1055 | gtctacatctaacc | 54552 | 54565 | 2-10-2 | 1055_1 | GTctacatctaaCC |
| 1056 | agtctacatctaac | 54553 | 54566 | 2-10-2 | 1056_1 | AGtctacatctaAC |
| 1057 | cagtctacatctaa | 54554 | 54567 | 2-10-2 | 1057_1 | CAgtctacatctAA |
| 1058 | tcagtctacatcta | 54555 | 54568 | 2-10-2 | 1058_1 | TCagtctacatcTA |
| 1059 | ttcagtctacatct | 54556 | 54569 | 2-10-2 | 1059_1 | TTcagtctacatCT |
| 1060 | taaccacacctcct | 54573 | 54586 | 2-10-2 | 1060_1 | TAaccacacctcCT |
| 1061 | ttaaccacacctcc | 54574 | 54587 | 2-10-2 | 1061_1 | TTaaccacacctCC |
| 1062 | tttaaccacacctc | 54575 | 54588 | 2-10-2 | 1062_1 | TTtaaccacaccTC |
| 1063 | ttttaaccacacct | 54576 | 54589 | 2-10-2 | 1063_1 | TTttaaccacacCT |
| 1064 | gttttaaccacacc | 54577 | 54590 | 2-10-2 | 1064_1 | GTtttaaccacaCC |
| 1065 | agttttaaccacac | 54578 | 54591 | 2-10-2 | 1065_1 | AGttttaaccacAC |
| 1066 | caacaaaacatcaa | 55228 | 55241 | 2-10-2 | 1066_1 | CAacaaaacatcAA |
| 1067 | tcaacaaaacatca | 55229 | 55242 | 2-10-2 | 1067_1 | TCaacaaaacatCA |
| 1068 | ttcaacaaaacatc | 55230 | 55243 | 2-10-2 | 1068_1 | TTcaacaaaacaTC |
| 1069 | tttcaacaaaacat | 55231 | 55244 | 2-10-2 | 1069_1 | TTtcaacaaaacAT |
| 1070 | ttttcaacaaaaca | 55232 | 55245 | 2-10-2 | 1070_1 | TTttcaacaaaaCA |
| 1071 | gttttcaacaaaac | 55233 | 55246 | 2-10-2 | 1071_1 | GTtttcaacaaaAC |
| 1072 | tgttttcaacaaaa | 55234 | 55247 | 2-10-2 | 1072_1 | TGttttcaacaaAA |
| 1073 | ttctaaaacttacc | 55269 | 55282 | 2-10-2 | 1073_1 | TTctaaaacttaCC |
| 1074 | tttctaaaacttac | 55270 | 55283 | 2-10-2 | 1074_1 | TTtctaaaacttAC |
| 1075 | ctttctaaaactta | 55271 | 55284 | 2-10-2 | 1075_1 | CTttctaaaactTA |
| 1076 | tctttctaaaactt | 55272 | 55285 | 2-10-2 | 1076_1 | TCtttctaaaacTT |
| 1077 | atctttctaaaact | 55273 | 55286 | 2-10-2 | 1077_1 | ATctttctaaaaCT |
| 1078 | aatctttctaaaac | 55274 | 55287 | 2-10-2 | 1078_1 | AAtctttctaaaAC |
| 1079 | gaatctttctaaaa | 55275 | 55288 | 2-10-2 | 1079_1 | GAatctttctaaAA |
| 1080 | agaatctttctaaa | 55276 | 55289 | 2-10-2 | 1080_1 | AGaatctttctaAA |
| 1081 | cagaatctttctaa | 55277 | 55290 | 2-10-2 | 1081_1 | CAgaatctttctAA |
| 1082 | cctttatttccctt | 55494 | 55507 | 2-10-2 | 1082_1 | CCtttatttcccTT |
| 1083 | ccctttatttccct | 55495 | 55508 | 2-10-2 | 1083_1 | CCctttatttccCT |
| 1084 | tccctttatttccc | 55496 | 55509 | 2-10-2 | 1084_1 | TCcctttatttcCC |
| 1085 | ttccctttatttcc | 55497 | 55510 | 2-10-2 | 1085_1 | TTccctttatttCC |
| 1086 | tttccctttatttc | 55498 | 55511 | 2-10-2 | 1086_1 | TTtccctttattTC |
| 1087 | atttccctttattt | 55499 | 55512 | 2-10-2 | 1087_1 | ATttccctttatTT |
| 1088 | tatttccctttatt | 55500 | 55513 | 2-10-2 | 1088_1 | TAtttccctttaTT |
| 1089 | gtatttccctttat | 55501 | 55514 | 2-10-2 | 1089_1 | GTatttccctttAT |

### Example 2: In vitro reduction of ATXN3 in SK-N-AS human cell line using further LNA gapmer oligonucleotides targeting ATNX3

### Materials and Methods:

[0404] LNA modified oligonucleotides targeting human ATXN3 were tested for their ability to reduce ATXN3 mRNA expression in human SK-N-AS neuroblastoma cells acquired from ECACC Cat: 94092302. The cells were cultured according to the vendor guidelines in Dulbecco's Modified Eagle's Medium, supplemented with 0.1 mM Non-Essential Amino Acids (NEAA) and fetal bovine serum to a final concentration of 10%. Cells were cultured at 37° C., 5% CO2 and 95% humidity in an active evaporation incubator (Thermo C10). Cells were seeded at a density of 9000 cells per well (96-well plate) in 190 ul of SK-N-AS cell culture medium. The cells were hereafter added 10 μl of oligo suspension or PBS (controls) to a final concentration of 5 μM from pre-made 96-well dilution plates. The cell culture plates were incubated for 72 hours in the incubator.

[0405] After incubation, cells were harvested by removal of media followed by cell lysis and RNA purification using QIAGEN RNeasy 96 Kit (cat 74181), following manufacturers protocol. RNA was diluted 2 fold in water prior to the one-step qPCR reaction. For one-step qPCR reaction qPCR-mix (qScriptTM XLT One-Step RT-qPCR ToughMix® Low ROX from QuantaBio, cat.no 95134-500) and QPCR was run as duplex QPCR using assays from Integrated DNA technologies for ATXN3 (Hs.PT.58.39355049) and TBP (Hs.PT.58v.39858774)

Hs.PT.58.39355049 - Primer Sequences
Probe:
(SEQ ID NO: 1130)
5′-/56-FAM/AAAGGCCAG/ZEN/CCACCAGTTCAGG/3IABkFQ/-3′
Primer 1:
(SEQ ID NO: 1129)
5′-CTATCAGGACAGAGTTCACATCC-3′
Primer 2:
(SEQ ID NO: 1128)
5′-GTTTCTAAAGACATGGTCACAGC-3′
Hs.PT.58v.39858774 - Primer Sequences
Probe:
(SEQ ID NO: 1131)
5′-/5HEX/TGA TCT TTG/ZEN/CAG TGA CCC AGC ATC A/
3IABkFQ/-3′
Primer 1:
(SEQ ID NO: 1132)
5′-GCT GTT TAA CTT CGC TTC CG-3′
Primer 2:
(SEQ ID NO: 1133)
5′-CAG CAA CTT CCT CAA TTC CTT G-3′

[0406] The reactions were then mixed in a qPCR plate (MICROAMP®optical 384 well, 4309849). After sealing, the plate was given a quick spin, 1000 g for 1 minute at RT, and transferred to a Viia™ 7 system (Applied Biosystems, Thermo), and the following PCR conditions used: 50° C. for 15 minutes; 95° C. for 3 minutes; 40 cycles of: 95° C. for 5 sec followed by a temperature decrease of 1.6° C./sec followed by 60° C. for 45 sec. The data was analyzed using the QuantStudio™ Real time PCR Software and quantity calculated by the delta delta Ct method (Quantity=2\hat{ }(−Ct)*1000000000). Quantity is normalized to the calculated quantity for the housekeeping gene assay (TBP) run in the same well. Relative Target Quantity=QUANTITY_target/QUANTITY_housekeeping (RNA knockdown) was calculated for each well by division with the mean of all PBS-treated wells on the same plate. Normalised Target Quantity=(Relative Target Quantity/[mean] Relative Target Quantity]_pbs_wells)*100.

[0407] Compounds targeting selected target sequence regions of SEQ ID NO:1 were evaluated in the above assay.

### Results:

[0408] The target knock-down data is presented in the following Compound and Data Table:

[0409] In the Compound table, motif sequences represent the contiguous sequence of nucleobases present in the oligonucleotide.

[0410] Oligonucleotide compound represent specific designs of a motif sequence. Capital letters represent beta-D-oxy LNA nucleosides, lowercase letters represent DNA nucleosides, all LNA C are 5-methyl cytosine, all internucleoside linkages are phosphorothioate internucleoside linkages.

TABLE 4
Compound and Data Table

| | | | | % of |
|---|---|---|---|---|
| | | | | ATXN3 |
| | | Oligonucleotide | Oligonucleotide | mRNA |
| SEQID | CMPID | Base Sequence | compound | remaining |
| 1099 | 1099_1 | CCAAAAGAAACCAAACCC | CCAAaagaaaccaaacCC | 90.6 |
| 1100 | 1100_1 | CCCCATTCAAATATTTATT | CCccattcaaatatttATT | 90.5 |
| 1101 | 1101_1 | AATCATTTACCCCCAAC | AAtcatttaccccCAAC | 92 |
| 1102 | 1102_1 | TATCTCAAACTATCCCCA | TAtctcaaactatcccCA | 93 |
| 1103 | 1103_1 | TCTATTCCTTAACCCAAC | TCTattccttaacccAAC | 76.6 |
| 1104 | 1104_1 | TCCCCTAAATAATTTAATCA | TCccctaaataatttaATCA | 79.3 |
| 1105 | 1105_1 | AAACCACTCCATTCCAA | AaaccactccattCCAA | 57.7 |
| 1106 | 1106_1 | TCTAAACCCCAAACTTTCA | TCtaaaccccaaactttCA | 74.3 |
| 1107 | 1107_1 | TTCTAAACCCCAAACTTTC | TTCtaaaccccaaacttTC | 61.8 |
| 1108 | 1108_1 | AGTTCTAAACCCCAAACT | AGttctaaaccccaaACT | 73.7 |
| 1109 | 1109_1 | TGAAACCATTACTACAACC | TGaaaccattactacAACC | 24.9 |
| 1110 | 1110_1 | ACATCATTTATCACTACCAC | ACAtcatttatcactaccAC | 71.9 |
| 1111 | 1111_1 | AACATTAAACCCTCCCA | AacattaaaccctcCCA | 80.2 |
| 1112 | 1112_1 | TCAGATCCTAAAATCACT | TCAgatcctaaaatcACT | 79.5 |
| 1113 | 1113_1 | CTATACCTAAAACAATCTA | CTAtacctaaaacaatCTA | 99.1 |
| 1114 | 1114_1 | TGATTCTTATACTTACTA | TGAttcttatacttaCTA | 72.1 |
| 1115 | 1115_1 | TAAAAATATAACTACTCCTA | TAaaaatataactactCCTA | 93.7 |
| 1116 | 1116_1 | TCTTCATTATACCATCAAAT | TCTtcattataccatcaAAT | 51.5 |
| 1117 | 1117_1 | GTTTCATATTTTTAATCC | GTTtcatatttttaaTCC | 37.7 |
| 1118 | 1118_1 | TAATATCCTCATTACCCATT | TAatatcctcattacccaTT | 84 |
| 1119 | 1119_1 | CAAATATTCACAAATCCTA | CAaatattcacaaatCCTA | 73.3 |
| 1120 | 1120_1 | CATCACAAAATAACCTATAC | CATcacaaaataacctaTCA | 79.9 |
| 1121 | 1121_1 | CTCTCAACTTCTACTACTAA | CTCtcaacttctactactAA | 59.6 |
| 1122 | 1122_1 | AATCTTATTTACATCTTCC | AATcttatttacatctTCC | 20.7 |
| 1123 | 1123_1 | CCAAAATTACTTCTTTTATC | CCAaaattacttcttttATC | 56.5 |
| 1124 | 1124_1 | AACCCAACTTTCTATTTT | AACCcaactttctattTT | 52.7 |
| 1125 | 1125_1 | ACAATATATTCCTCAATCA | ACAatatattcctcaaTCA | 86.8 |
| 1126 | 1126_1 | CCTGTAACAATTATACA | CCTgtaacaattatACA | 92.3 |
| 1127 | 1127_1 | CATCCCTTTACCACTTT | CAtccctttaccactTT | 94.5 |

[0411] In the oligonucleotide compound column, capital letters represent beta-D-oxy LNA nucleosides, LNA cytosines are 5-methyl cytosine, lower case letters are DNA nucleosides, and all internucleoside linkages are phosphorothioate.

[0412] As can be seen, most of the above compounds targeting the listed target sequence regions are capable of inhibiting the expression of the human ataxin 3 transcript and that compounds targeting the target sequence region complementary to SEQ ID NOS:1122 and 1109 are particularly effective in inhibiting the human ataxin 3 transcript. Other effective target sites for ATXN3 can be determined from the above table.

### Example 3

### Materials and Methods:

[0413] The screening assay described in Example 2 was performed using a series of further oligonucleotide targeting human ATXN3 pre-mRNA using the qpCR: (ATXN3 exon 8-9(1) PrimeTime® XL qPCR Assay (IDT).

qPCR probe and primers set 2:
Probe:
(SEQ ID NO: 1134)
5′-/56-FAM/CTCCGCAGG/ZEN/GCT ATTCAGCT AAGT/
31ABkFQ/-3′
Primer 1:
(SEQ ID NO: 1135)
5′-AGT AAGATTTGT ACCTGATGTCTGT-3′
Primer 2:
(SEQ ID NO: 1136)
5′-CATGGAAGATGAGGAAGCAGAT-3′

### Results:

[0414] The results are shown in the following table:

TABLE 5

| | | | | % of |
|---|---|---|---|---|
| | | | | ATXN3 |
| | | Oligonucleotide | Oligonucleotide | mRNA |
| SEQID | CMPID | Base Sequence | compound | remaining |
| 1137 | 1137_1 | CCTACTTCACTTCCTAA | CctacttcacttcCTAA | 68.9 |
| 1138 | 1138_1 | TTTCCTACTTCACTTCCTA | TttcctacttcacttccTA | 95.1 |
| 1139 | 1139_1 | TTCCTACTTCACTTCCTA | TtcctacttcacttcCTA | 85 |
| 1140 | 1140_1 | TTTCCTACTTCACTTCCT | TTtcctacttcacttcCT | 88.1 |
| 1141 | 1141_1 | TTTCCTACTTCACTTCC | TttcctacttcactTCC | 83.1 |
| 1142 | 1142_1 | GTTTCCTACTTCACTTC | GTTtcctacttcactTC | 60.2 |
| 1143 | 1143_1 | ACCAAACCCAAACATCCC | AccaaacccaaacatcCC | 88 |
| 1144 | 1144_1 | AGAAACCAAACCCAAACATC | AgaaaccaaacccaaaCATC | 91.3 |
| 1145 | 1145_1 | AGAAACCAAACCCAAACAT | AGaaaccaaacccaaACAT | 93.5 |
| 1146 | 1146_1 | CTCCTAATACCTAAAAACAAA | CTCCtaatacctaaaaacaAA | 100 |
| 1147 | 1147_1 | CTCCTAATACCTAAAAACA | CTCCtaatacctaaaaaCA | 94.2 |
| 1148 | 1148_1 | ACTCCTAATACCTAAAAACA | ACTCctaatacctaaaaaCA | 81 |
| 1149 | 1149_1 | CACTCCTAATACCTAAAAACA | CACtcctaatacctaaaaACA | 90.4 |
| 1150 | 1150_1 | CCACTCCTAATACCTAAAAA | CCACtcctaatacctaaaAA | 63 |
| 1151 | 1151_1 | TCCACTCCTAATACCTAAAAA | TCCactcctaatacctaaaAA | 54 |
| 1152 | 1152_1 | CCACTCCTAATACCTAAAA | CCACtcctaatacctaaAA | 73.7 |
| 1153 | 1153_1 | TCCACTCCTAATACCTAAAA | TCCactcctaatacctaAAA | 59 |
| 1154 | 1154_1 | CCACTCCTAATACCTAAA | CCACtcctaatacctaAA | 65.2 |
| 1155 | 1155_1 | GTCCACTCCTAATACCTAAA | GtccactcctaataccTAAA | 86.8 |
| 1156 | 1156_1 | CCACTCCTAATACCTAA | CCactcctaatacCTAA | 52.3 |
| 1157 | 1157_1 | TCCACTCCTAATACCTAA | TCcactcctaatacCTAA | 64.3 |
| 1157 | 1157_2 | TCCACTCCTAATACCTAA | TCCActcctaatacctAA | 66 |
| 1158 | 1158_1 | GTCCACTCCTAATACCTAA | GtccactcctaataccTAA | 85.5 |
| 1159 | 1159_1 | AGTCCACTCCTAATACCTA | AgtccactcctaataccTA | 87.4 |
| 1160 | 1160_1 | TCCACTCCTAATACCTA | TCcactcctaatacCTA | 70.1 |
| 1161 | 1161_1 | AGTCCACTCCTAATACCT | AgtccactcctaatacCT | 84.2 |
| 1162 | 1162_1 | GTCCACTCCTAATACC | GTCcactcctaataCC | 57.8 |
| 1163 | 1163_1 | AGTCCACTCCTAATACC | AGtccactcctaataCC | 77.1 |
| 1164 | 1164_1 | CAGTCCACTCCTAATACC | CagtccactcctaatACC | 86.7 |
| 1162 | 1162_2 | GTCCACTCCTAATACC | GTCcactcctaatACC | 67.8 |
| 1165 | 1165_1 | CCAGTCCACTCCTAATAC | CcagtccactcctaaTAC | 85.4 |
| 1166 | 1166_1 | CAGTCCACTCCTAATAC | CAgtccactcctaaTAC | 60.7 |
| 1167 | 1167_1 | AGTCCACTCCTAATAC | AGTCcactcctaatAC | 78.9 |
| 1168 | 1168_1 | CAGTCCACTCCTAATA | CAGtccactcctaaTA | 44.5 |
| 1169 | 1169_1 | CCAGTCCACTCCTAATA | CCagtccactcctaaTA | 33.8 |
| 1170 | 1170_1 | GCAACTCTTTCCAAACA | GCAActctttccaaaCA | 36 |
| 1171 | 1171_1 | AGCAACTCTTTCCAAACA | AGCaactctttccaaaCA | 35.3 |
| 1172 | 1172_1 | CAGCAACTCTTTCCAAACA | CAgcaactctttccaaACA | 58.3 |
| 1173 | 1173_1 | CCAGCAACTCTTTCCAAA | CcagcaactctttcCAAA | 69.7 |
| 1174 | 1174_1 | CCAGCAACTCTTTCCAA | CCagcaactctttcCAA | 42.1 |
| 1175 | 1175_1 | ACCAGCAACTCTTTCCAA | ACcagcaactctttcCAA | 65 |
| 1176 | 1176_1 | TTACCAGCAACTCTTTC | TTACcagcaactcttTC | 53 |
| 1177 | 1177_1 | TGCTCCTCCTATTAAATAA | TGCtcctcctattaaatAA | 76.3 |
| 1178 | 1178_1 | GCTCCTCCTATTAAATAA | GCtcctcctattaaATAA | 61.8 |
| 1179 | 1179_1 | GCTCCTCCTATTAAATA | GCtcctcctattaaATA | 60.2 |
| 1180 | 1180_1 | TGCTCCTCCTATTAAATA | TGctcctcctattaaATA | 70.2 |
| 1181 | 1181_1 | TGCTCCTCCTATTAAAT | TGCtcctcctattaaAT | 80.2 |
| 1182 | 1182_1 | TTGCTCCTCCTATTAAAT | TTGCtcctcctattaaAT | 79 |
| 1183 | 1183_1 | ATTTAATAAAACAAAAACCCT | ATttaataaaacaaaaaCCCT | 97.2 |
| 1184 | 1184_1 | GCCCAAAAAACTAAATT | GCCCaaaaaactaaaTT | 95.5 |
| 1185 | 1185_1 | GTTTTTACATTCTAACTT | GTTtttacattctaaCTT | 54.1 |
| 1186 | 1186_1 | TGTTTTTACATTCTAACT | TGTTtttacattctaaCT | 63.8 |
| 1187 | 1187_1 | CTGTTTTTACATTCTAAC | CTGTttttacattctaAC | 62.5 |
| 1188 | 1188_1 | CCCCATTCAAATATTTAT | CCCcattcaaatattTAT | 64.9 |
| 1189 | 1189_1 | GCCCCATTCAAATATTTAT | GCcccattcaaatattTAT | 86.2 |
| 1188 | 1188_2 | CCCCATTCAAATATTTAT | CCCCattcaaatatttAT | 96.2 |
| 1190 | 1190_1 | GCCCCATTCAAATATTTA | GCcccattcaaatatTTA | 82.2 |
| 1191 | 1191_1 | CCATTCAAATATATACATTTT | CCATtcaaatatatacattTT | 72 |
| 1191 | 1191_2 | CCATTCAAATATATACATTTT | CCATtcaaataTatacattTT | 37.7 |
| 1192 | 1192_1 | TCCATTCAAATATATACATTT | TCCAttcaaatatatacatTT | 56.8 |
| 1193 | 1193_1 | ATCCATTCAAATATATACATT | ATCCattcaaaTatatacaTT | 48 |
| 1194 | 1194_1 | TCCATTCAAATATATACATT | TCCAttcaaatatatacaTT | 53.7 |
| 1193 | 1193_2 | ATCCATTCAAATATATACATT | ATCCattcaaatatatacaTT | 54.7 |
| 1195 | 1195_1 | TATCCATTCAAATATATACAT | TATccattcaaatatataCAT | 80.1 |
| 1196 | 1196_1 | TCCATTCAAATATATACAT | TCCattcaaatatataCAT | 43.1 |
| 1197 | 1197_1 | ATCCATTCAAATATATACA | ATCCattcaaatatataCA | 53.9 |
| 1198 | 1198_1 | TTATCCATTCAAATATATACA | TTatccattcaaatataTACA | 69.4 |
| 1199 | 1199_1 | TCCATTCAAATATATACA | TCCAttcaaatatataCA | 54.7 |
| 1200 | 1200_1 | TATCCATTCAAATATATACA | TATCcattcaaatatataCA | 53.3 |
| 1201 | 1201_1 | CTTTATCCATTCAAATATATA | CTttatccattcaaataTATA | 85.5 |
| 1202 | 1202_1 | TCTTTATCCATTCAAATATAT | TCTttatccattcaaataTAT | 62.6 |
| 1203 | 1203_1 | CTCTTTATCCATTCAAATATA | CTCtttatccattcaaatATA | 38.4 |
| 1204 | 1204_1 | TCTTTATCCATTCAAATATA | TCtttatccattcaaaTATA | 70.9 |
| 1203 | 1203_2 | CTCTTTATCCATTCAAATATA | CTCTttatccattcaaataTA | 33.6 |
| 1205 | 1205_1 | CTTTATCCATTCAAATATA | CTttatccattcaaaTATA | 78.4 |
| 1206 | 1206_1 | TCTCTTTATCCATTCAAATAT | TCtctttatccattcaaaTAT | 82 |
| 1207 | 1207_1 | CTCTTTATCCATTCAAATAT | CTCtttatccattcaaaTAT | 39.8 |
| 1208 | 1208_1 | TCTTTATCCATTCAAATAT | TCTttatccattcaaaTAT | 63.1 |
| 1209 | 1209_1 | TCTCTTTATCCATTCAAATA | TCtctttatccattcaAATA | 65.2 |
| 1210 | 1210_1 | CTCTTTATCCATTCAAATA | CTCTttatccattcaaaTA | 32.2 |
| 1211 | 1211_1 | TCTCTTTATCCATTCAAAT | TCTCtttatccattcaaAT | 42 |
| 1212 | 1212_1 | TCTCTTTATCCATTCAAA | TCTCtttatccattcaAA | 42.5 |
| 1213 | 1213_1 | AGCACCATATATATCTCA | AgcaccatatatatCTCA | 16 |
| 1214 | 1214_1 | GCACCATATATATCTCA | GCaccatatatatcTCA | 16 |
| 1215 | 1215_1 | CAGCACCATATATATCTCA | CagcaccatatatatCTCA | 19.2 |
| 1215 | 1215_2 | CAGCACCATATATATCTCA | CAgcaccatatatatcTCA | 24.1 |
| 1216 | 1216_1 | AGCACCATATATATCTC | AGCaccatatatatcTC | 19.9 |
| 1217 | 1217_1 | GCACCATATATATCTC | GCACcatatatatcTC | 82.7 |
| 1218 | 1218_1 | CAGCACCATATATATCTC | CAgcaccatatatatCTC | 21.1 |
| 1219 | 1219_1 | CAGCACCATATATATCT | CAGcaccatatataTCT | 28.9 |
| 1220 | 1220_1 | ACAGCACCATATATATCT | ACAGcaccatatatatCT | 21.9 |
| 1221 | 1221_1 | ACAGCACCATATATATC | ACAGcaccatatataTC | 25.4 |
| 1222 | 1222_1 | CTATGTTATTATCCCCA | CTAtgttattatcccCA | 56.1 |
| 1223 | 1223_1 | TCTATGTTATTATCCCC | TctatgttattatcCCC | 47.7 |
| 1224 | 1224_1 | CTCTACACTCTAACTCT | CtctacactctaaCTCT | 79.3 |
| 1225 | 1225_1 | TCTCTACACTCTAACTCT | TctctacactctaaCTCT | 79.6 |
| 1226 | 1226_1 | TTCTCTACACTCTAACTCT | TTCtctacactctaactCT | 86.9 |
| 1227 | 1227_1 | CTTCTCTACACTCTAACTCT | CTtctctacactctaactCT | 97 |
| 1227 | 1227_2 | CTTCTCTACACTCTAACTCT | CttctctacactctaacTCT | 84.5 |
| 1228 | 1228_1 | TTCTCTACACTCTAACTC | TTCtctacactctaacTC | 81.4 |
| 1229 | 1229_1 | CTTCTCTACACTCTAACTC | CttctctacactctaaCTC | 89.1 |
| 1230 | 1230_1 | TCTCTACACTCTAACTC | TCtctacactctaaCTC | 87.3 |
| 1231 | 1231_1 | CCTTCTCTACACTCTAACTC | CcttctctacactctaacTC | 98.3 |
| 1232 | 1232_1 | TTCTCTACACTCTAACT | TTCTctacactctaaCT | 80.1 |
| 1233 | 1233_1 | CTTCTCTACACTCTAACT | CTTctctacactctaaCT | 73.6 |
| 1234 | 1234_1 | CCTTCTCTACACTCTAACT | CcttctctacactctAACT | 77.7 |
| 1235 | 1235_1 | CCTTCTCTACACTCTAAC | CCTtctctacactctaAC | 82.4 |
| 1236 | 1236_1 | CTTCTCTACACTCTAAC | CTtctctacactcTAAC | 90.6 |
| 1237 | 1237_1 | AGCCTTCTCTACACTCTAA | AgccttctctacactcTAA | 80 |
| 1238 | 1238_1 | CCTTCTCTACACTCTAA | CCttctctacactcTAA | 72.2 |
| 1239 | 1239_1 | GCCTTCTCTACACTCTAA | GCcttctctacactctAA | 62.9 |
| 1240 | 1240_1 | AGCCTTCTCTACACTCTA | AgccttctctacactcTA | 85.2 |
| 1241 | 1241_1 | TACTAACTACAACACAAATCA | TACtaactacaacacaaaTCA | 91.3 |
| 1241 | 1241_2 | TACTAACTACAACACAAATCA | TACtaactacAacacaaaTCA | 81.1 |
| 1242 | 1242_1 | CTACTAACTACAACACAAATC | CTACtaactacaacacaaaTC | 108 |
| 1243 | 1243_1 | CACTACTAACTACAACACAAA | CACTactaactacaacacaAA | 74 |
| 1244 | 1244_1 | CACTACTAACTACAACACAA | CACtactaactacaacaCAA | 87.4 |
| 1245 | 1245_1 | ACACTACTAACTACAACACAA | ACActactaactacaacaCAA | 84.1 |
| 1246 | 1246_1 | CACTACTAACTACAACACA | CACTactaactacaacaCA | 83.5 |
| 1247 | 1247_1 | ACACTACTAACTACAACACA | ACACtactaactacaacaCA | 81.3 |
| 1248 | 1248_1 | GACACTACTAACTACAACAC | GACactactaactacaaCAC | 51.6 |
| 1249 | 1249_1 | GACACTACTAACTACAACA | GACActactaactacaaCA | 51 |
| 1250 | 1250_1 | AGACACTACTAACTACAA | AGAcactactaactaCAA | 57.2 |
| 1251 | 1251_1 | AGACACTACTAACTACA | AGACactactaactaCA | 34.7 |
| 1252 | 1252_1 | ATCATTTACCCCCAACCT | AtcatttacccccaacCT | 96 |
| 1253 | 1253_1 | ATCATTTACCCCCAACC | AtcatttacccccAACC | 89.1 |
| 1254 | 1254_1 | CAAATCATTTACCCCCAA | CaaatcatttacccCCAA | 92 |
| 1255 | 1255_1 | CCAAATCATTTACCCCCAA | CcaaatcatttaccccCAA | 91 |
| 1256 | 1256_1 | ACCAAATCATTTACCCCCA | AccaaatcatttaccccCA | 89.9 |
| 1257 | 1257_1 | TACCAAATCATTTACCCCC | TaccaaatcatttacccCC | 84 |
| 1258 | 1258_1 | ACCAAATCATTTACCCC | ACcaaatcatttacCCC | 69.9 |
| 1259 | 1259_1 | TACCAAATCATTTACCCC | TACcaaatcatttaccCC | 56.3 |
| 1260 | 1260_1 | CTACCAAATCATTTACCCC | CtaccaaatcatttaccCC | 94 |
| 1261 | 1261_1 | TACCAAATCATTTACCC | TAccaaatcatttACCC | 68.9 |
| 1262 | 1262_1 | CTACCAAATCATTTACC | CTACcaaatcatttaCC | 70.3 |
| 1263 | 1263_1 | TGCTACCAAATCATTTACC | TgctaccaaatcattTACC | 79 |
| 1264 | 1264_1 | GCTACCAAATCATTTACC | GCtaccaaatcatttACC | 83.6 |
| 1265 | 1265_1 | TGCTACCAAATCATTTAC | TGCTaccaaatcatttAC | 88.3 |
| 1266 | 1266_1 | GCTACCAAATCATTTAC | GCTaccaaatcattTAC | 71.4 |
| 1267 | 1267_1 | TGCTACCAAATCATTTA | TGCtaccaaatcatTTA | 79.8 |
| 1268 | 1268_1 | CTGCTACCAAATCATTTA | CTGctaccaaatcatTTA | 75.3 |
| 1269 | 1269_1 | ACTGCTACCAAATCATTT | ACTGctaccaaatcatTT | 83.4 |
| 1270 | 1270_1 | CTGCTACCAAATCATTT | CTGCtaccaaatcatTT | 83 |
| 1271 | 1271_1 | ACTGCTACCAAATCATT | ACTGctaccaaatcaTT | 71.1 |
| 1272 | 1272_1 | CACTTTGCCATAATCAA | CActttgccataaTCAA | 26 |
| 1273 | 1273_1 | TTATCTCAAACTATCCCCA | TTAtctcaaactatcccCA | 92.9 |
| 1274 | 1274_1 | ATCTCAAACTATCCCCA | ATctcaaactatccCCA | 72.3 |
| 1275 | 1275_1 | CTTATCTCAAACTATCCCCA | CttatctcaaactatcccCA | 85.5 |
| 1276 | 1276_1 | TATCTCAAACTATCCCC | TatctcaaactatcCCC | 79.8 |
| 1277 | 1277_1 | CTTATCTCAAACTATCCCC | CTtatctcaaactatccCC | 84 |
| 1278 | 1278_1 | TTATCTCAAACTATCCCC | TTAtctcaaactatccCC | 89.7 |
| 1279 | 1279_1 | CTTATCTCAAACTATCCC | CttatctcaaactaTCCC | 83.5 |
| 1280 | 1280_1 | CCTTATCTCAAACTATCCC | CcttatctcaaactatcCC | 87.6 |
| 1279 | 1279_2 | CTTATCTCAAACTATCCC | CTtatctcaaactatCCC | 76.9 |
| 1281 | 1281_1 | TTATCTCAAACTATCCC | TtatctcaaactaTCCC | 84.7 |
| 1282 | 1282_1 | CTTATCTCAAACTATCC | CTTatctcaaactaTCC | 78.3 |
| 1283 | 1283_1 | CCCTTATCTCAAACTATCC | CccttatctcaaactaTCC | 76.4 |
| 1284 | 1284_1 | CCTTATCTCAAACTATCC | CCTtatctcaaactatCC | 69.3 |
| 1285 | 1285_1 | CCTTATCTCAAACTATC | CCttatctcaaacTATC | 75.9 |
| 1286 | 1286_1 | GCCCTTATCTCAAACTATC | GCccttatctcaaactaTC | 76.6 |
| 1287 | 1287_1 | CCCTTATCTCAAACTATC | CCcttatctcaaacTATC | 67.2 |
| 1288 | 1288_1 | TGCCCTTATCTCAAACTAT | TgcccttatctcaaacTAT | 90.5 |
| 1289 | 1289_1 | GCCCTTATCTCAAACTAT | GCccttatctcaaacTAT | 71.9 |
| 1290 | 1290_1 | CCCTTATCTCAAACTAT | CCCTtatctcaaactAT | 77.7 |
| 1291 | 1291_1 | GCCCTTATCTCAAACTA | GCccttatctcaaacTA | 68.4 |
| 1292 | 1292_1 | TGCCCTTATCTCAAACTA | TgcccttatctcaaaCTA | 81.5 |
| 1293 | 1293_1 | TGCCCTTATCTCAAACT | TGcccttatctcaaaCT | 75.7 |
| 1294 | 1294_1 | TTGCCCTTATCTCAAAC | TTGCccttatctcaaAC | 89 |
| 1295 | 1295_1 | CTTGCCCTTATCTCAA | CTtgcccttatcTCAA | 48.2 |
| 1296 | 1296_1 | TGAAATCAAACTTCATCA | TGAaatcaaacttcaTCA | 66.5 |
| 1297 | 1297_1 | GGTCACCATACTTAAT | GGTCaccatacttaAT | 89.7 |
| 1298 | 1298_1 | TGCTAACACAAATTTCCT | TGctaacacaaattTCCT | 47.3 |
| 1299 | 1299_1 | GCTAACACAAATTTCCT | GCTaacacaaatttCCT | 48.9 |
| 1299 | 1299_2 | GCTAACACAAATTTCCT | GCtaacacaaattTCCT | 45.7 |
| 1300 | 1300_1 | TTGCTAACACAAATTTCC | TTGCtaacacaaatttCC | 60.7 |
| 1301 | 1301_1 | TGCTAACACAAATTTCC | TGCTaacacaaatttCC | 62.6 |
| 1302 | 1302_1 | TTGCTAACACAAATTTC | TTGCtaacacaaattTC | 72.4 |
| 1303 | 1303_1 | CCTTTGCTAACACAAAT | CCTTtgctaacacaaAT | 48.1 |
| 1304 | 1304_1 | GTATAACCAATAATAACTA | GTAtaaccaataataaCTA | 86.1 |
| 1305 | 1305_1 | TCTGACATCACACAATTT | TCTGacatcacacaatTT | 67.8 |
| 1306 | 1306_1 | TCTGACATCACACAATT | TCTGacatcacacaaTT | 70.2 |
| 1307 | 1307_1 | TATCTGACATCACACAA | TATctgacatcacaCAA | 69.8 |
| 1308 | 1308_1 | CTATTCCTTAACCCAAC | CTattccttaaccCAAC | 77.7 |
| 1309 | 1309_1 | GTCTATTCCTTAACCCAAC | GtctattccttaaccCAAC | 86.2 |
| 1310 | 1310_1 | GTCTATTCCTTAACCCAA | GtctattccttaacCCAA | 60.4 |
| 1311 | 1311_1 | TCTATTCCTTAACCCAA | TCTattccttaaccCAA | 51 |
| 1312 | 1312_1 | GTCTATTCCTTAACCCA | GtctattccttaacCCA | 67.3 |
| 1313 | 1313_1 | GTCTATTCCTTAACCC | GtctattccttaaCCC | 77.4 |
| 1314 | 1314_1 | GGTCTATTCCTTAACC | GGtctattccttaaCC | 83.2 |
| 1315 | 1315_1 | AGAACATTTCCTTCTCCT | AgaacatttccttctcCT | 84.2 |
| 1316 | 1316_1 | AACTGTCCCAAACAACC | AACtgtcccaaacaaCC | 75 |
| 1317 | 1317_1 | TTAGTCTCCCTCATTTTC | TtagtctccctcattTTC | 72.4 |
| 1318 | 1318_1 | ATTTAGTCTCCCTCATT | ATttagtctccctCATT | 48 |
| 1319 | 1319_1 | ATGCATCAAATCTCATA | ATGCatcaaatctcaTA | 83.7 |
| 1320 | 1320_1 | CCTAAATAATTTAATCATTAA | CCTaaataatttaatcatTAA | 94 |
| 1321 | 1321_1 | CCCTAAATAATTTAATCATTA | CCCTaaataatttaatcatTA | 88.8 |
| 1322 | 1322_1 | CCCCTAAATAATTTAATCATT | CCCctaaataatttaatcATT | 80.7 |
| 1323 | 1323_1 | CCCTAAATAATTTAATCATT | CCCTaaataatttaatcaTT | 82.2 |
| 1324 | 1324_1 | CCCTAAATAATTTAATCAT | CCCtaaataatttaatCAT | 87.1 |
| 1325 | 1325_1 | CCCCTAAATAATTTAATCA | CCCctaaataatttaaTCA | 79.9 |
| 1326 | 1326_1 | CCCTAAATAATTTAATCA | CCCtaaataatttaaTCA | 82.5 |
| 1327 | 1327_1 | CCCCTAAATAATTTAATC | CCCCtaaataatttaaTC | 116 |
| 1328 | 1328_1 | TCCCCTAAATAATTTAATC | TCCCctaaataatttaaTC | 109 |
| 1329 | 1329_1 | TTGCTAATATTTCCAAAA | TTGCtaatatttccaaAA | 84.2 |
| 1330 | 1330_1 | CTTGCTAATATTTCCAA | CTtgctaatatttCCAA | 66.1 |
| 1331 | 1331_1 | ACTGTCATCCATATTTCC | ActgtcatccatattTCC | 66.2 |
| 1332 | 1332_1 | ACTGTCATCCATATTTC | ACTgtcatccatatTTC | 48.1 |
| 1333 | 1333_1 | AATGCCCCACTCTAATAT | AATGccccactctaatAT | 36.9 |
| 1334 | 1334_1 | TGCCCCACTCTAATAT | TGCcccactctaatAT | 52.8 |
| 1335 | 1335_1 | ATGCCCCACTCTAATAT | ATgccccactctaaTAT | 43.7 |
| 1336 | 1336_1 | AAATGCCCCACTCTAATA | AAATgccccactctaaTA | 25.7 |
| 1337 | 1337_1 | ATGCCCCACTCTAATA | ATGccccactctaaTA | 28.6 |
| 1338 | 1338_1 | AATGCCCCACTCTAATA | AATGccccactctaaTA | 29.9 |
| 1339 | 1339_1 | TTAAATGCCCCACTCTA | TtaaatgccccactCTA | 51.3 |
| 1340 | 1340_1 | TCTGAAAATTCACTATCT | TCTGaaaattcactatCT | 35.7 |
| 1341 | 1341_1 | GTCTACTATATACATCT | GTCtactatatacaTCT | 30.6 |
| 1342 | 1342_1 | AGTCTACTATATACATCT | AGTCtactatatacatCT | 45.3 |
| 1343 | 1343_1 | AGTCTACTATATACATC | AGTCtactatatacaTC | 57 |
| 1344 | 1344_1 | GTCTACTATATACATC | GTCTactatatacaTC | 46.5 |
| 1345 | 1345_1 | TAGTCTACTATATACATC | TAgtctactatataCATC | 68.3 |
| 1346 | 1346_1 | TAGTCTACTATATACAT | TAGtctactatataCAT | 89 |
| 1347 | 1347_1 | CTAGTCTACTATATACAT | CTAgtctactatataCAT | 86.6 |
| 1348 | 1348_1 | CTAGTCTACTATATACA | CTAGtctactatataCA | 88.5 |
| 1349 | 1349_1 | ACTAGTCTACTATATAC | ACTagtctactataTAC | 85.1 |
| 1350 | 1350_1 | CTAGTCTACTATATAC | CTAgtctactataTAC | 85.3 |
| 1351 | 1351_1 | GTATATTCTACCCATAA | GTAtattctacccaTAA | 51.3 |
| 1352 | 1352_1 | TGTATATTCTACCCATAA | TGTatattctacccaTAA | 48.4 |
| 1353 | 1353_1 | TGTATATTCTACCCATA | TGtatattctaccCATA | 45.6 |
| 1354 | 1354_1 | ATGTATATTCTACCCATA | ATgtatattctaccCATA | 90.2 |
| 1355 | 1355_1 | ATGTATATTCTACCCAT | ATgtatattctacCCAT | 51.1 |
| 1356 | 1356_1 | GAAAACCACACAATTCCTA | GaaaaccacacaattCCTA | 58.9 |
| 1357 | 1357_1 | GAAAACCACACAATTCCT | GAaaaccacacaatTCCT | 56.4 |
| 1358 | 1358_1 | AGAAAACCACACAATTCCT | AGaaaaccacacaattCCT | 58.4 |
| 1359 | 1359_1 | CAGAAAACCACACAATTCC | CAGaaaaccacacaatTCC | 43.3 |
| 1360 | 1360_1 | AGAAAACCACACAATTCC | AGAaaaccacacaatTCC | 47.6 |
| 1361 | 1361_1 | CCAGAAAACCACACAATTC | CCAGaaaaccacacaatTC | 26.3 |
| 1362 | 1362_1 | CCAGAAAACCACACAATT | CCAGaaaaccacacaaTT | 21 |
| 1363 | 1363_1 | TCCAGAAAACCACACAAT | TCCAgaaaaccacacaAT | 47.1 |
| 1364 | 1364_1 | TTCCAGAAAACCACACAA | TTCCagaaaaccacacAA | 49.8 |
| 1364 | 1364_2 | TTCCAGAAAACCACACAA | TTCcagaaaaccacaCAA | 45.8 |
| 1365 | 1365_1 | GATATATCACTAAATCCAT | GAtatatcactaaatCCAT | 27.4 |
| 1366 | 1366_1 | GATATATCACTAAATCCA | GAtatatcactaaaTCCA | 43.7 |
| 1367 | 1367_1 | AGATATATCACTAAATCCA | AGatatatcactaaaTCCA | 37.4 |
| 1368 | 1368_1 | AGATATATCACTAAATCC | AGAtatatcactaaaTCC | 33.6 |
| 1369 | 1369_1 | TCATATATAAATTTCTCTA | TCAtatataaatttctCTA | 78 |
| 1369 | 1369_2 | TCATATATAAATTTCTCTA | TCATatataaatttctcTA | 73.1 |
| 1370 | 1370_1 | TCATATATAAATTTCTCT | TCatatataaatttCTCT | 27.9 |
| 1370 | 1370_2 | TCATATATAAATTTCTCT | TCATatataaatttctCT | 60.2 |
| 1371 | 1371_1 | AAGATCACACAACCATA | AAGAtcacacaaccaTA | 19.8 |
| 1372 | 1372_1 | TAAAAGATCACACAACCA | TAaaagatcacacaACCA | 47.5 |
| 1373 | 1373_1 | CATCACATAAAAACCCACTT | CATcacataaaaacccaCTT | 45.4 |
| 1374 | 1374_1 | CATCACATAAAAACCCACT | CAtcacataaaaaccCACT | 57.9 |
| 1375 | 1375_1 | TCATCACATAAAAACCCACT | TCatcacataaaaaccCACT | 30.1 |
| 1376 | 1376_1 | CATCACATAAAAACCCAC | CAtcacataaaaacCCAC | 61.6 |
| 1377 | 1377_1 | TCATCACATAAAAACCCAC | TCatcacataaaaacCCAC | 30.6 |
| 1378 | 1378_1 | GTCATCACATAAAAACCCAC | GTCatcacataaaaaccCAC | 24.9 |
| 1379 | 1379_1 | GTCATCACATAAAAACCCA | GTCatcacataaaaacCCA | 28.7 |
| 1380 | 1380_1 | TCATCACATAAAAACCCA | TCatcacataaaaaCCCA | 43.9 |
| 1381 | 1381_1 | CATCACATAAAAACCCA | CAtcacataaaaaCCCA | 71.5 |
| 1382 | 1382_1 | TCATCACATAAAAACCC | TCAtcacataaaaaCCC | 42.9 |
| 1383 | 1383_1 | GTCATCACATAAAAACCC | GTCatcacataaaaaCCC | 24.9 |
| 1384 | 1384_1 | AGTCATCACATAAAAACCC | AGtcatcacataaaaACCC | 35.8 |
| 1384 | 1384_2 | AGTCATCACATAAAAACCC | AGTCatcacataaaaacCC | 23 |
| 1385 | 1385_1 | TAGTCATCACATAAAAACC | TAGTcatcacataaaaaCC | 36.3 |
| 1386 | 1386_1 | AGTCATCACATAAAAACC | AGTCatcacataaaaaCC | 34.9 |
| 1387 | 1387_1 | ATGCTAAATACAAATCT | ATGCtaaatacaaatCT | 81 |
| 1388 | 1388_1 | GAAACCATTACTACAACCAA | GAaaccattactacaaCCAA | 20.1 |
| 1389 | 1389_1 | GAAACCATTACTACAACCA | GAaaccattactacaACCA | 15.9 |
| 1390 | 1390_1 | ATGAAACCATTACTACAAC | ATGAaaccattactacaAC | 45.6 |
| 1391 | 1391_1 | CATGAAACCATTACTACA | CATGaaaccattactaCA | 55.9 |
| 1392 | 1392_1 | CCATGAAACCATTACTAC | CCatgaaaccattaCTAC | 29.5 |
| 1393 | 1393_1 | CTCCCATGAAACCATTA | CTCCcatgaaaccatTA | 73.7 |
| 1394 | 1394_1 | TGCTTACTTTATACAAAA | TGCTtactttatacaaAA | 55.9 |
| 1395 | 1395_1 | ATGTTAATACTTTTTCCA | ATGttaatactttttCCA | 92.9 |
| 1396 | 1396_1 | CCTAATTTAACCCACAA | CCTaatttaacccaCAA | 32.2 |
| 1397 | 1397_1 | ATCCTAATTTAACCCACAA | ATCctaatttaacccaCAA | 38.1 |
| 1398 | 1398_1 | TCCTAATTTAACCCACAA | TCCtaatttaacccaCAA | 39.9 |
| 1399 | 1399_1 | TAATCCTAATTTAACCCACAA | TAAtcctaatttaacccaCAA | 72.8 |
| 1400 | 1400_1 | TAATCCTAATTTAACCCACA | TAatcctaatttaaccCACA | 45 |
| 1401 | 1401_1 | AATCCTAATTTAACCCACA | AATCctaatttaacccaCA | 41.2 |
| 1402 | 1402_1 | TCCTAATTTAACCCACA | TCCtaatttaacccACA | 38.3 |
| 1403 | 1403_1 | TAATCCTAATTTAACCCAC | TAatcctaatttaacCCAC | 37.5 |
| 1404 | 1404_1 | ATCCTAATTTAACCCAC | ATcctaatttaacCCAC | 34.4 |
| 1405 | 1405_1 | AATCCTAATTTAACCCAC | AAtcctaatttaacCCAC | 48.2 |
| 1406 | 1406_1 | TAATCCTAATTTAACCCA | TAatcctaatttaaCCCA | 56.5 |
| 1407 | 1407_1 | AATCCTAATTTAACCCA | AAtcctaatttaaCCCA | 71.7 |
| 1408 | 1408_1 | GTAATCCTAATTTAACCCA | GtaatcctaatttaaCCCA | 63.6 |
| 1409 | 1409_1 | TAATCCTAATTTAACCC | TAatcctaatttaACCC | 56.5 |
| 1410 | 1410_1 | GTAATCCTAATTTAACCC | GTaatcctaatttaACCC | 44 |
| 1411 | 1411_1 | AGTAATCCTAATTTAACCC | AGtaatcctaatttaaCCC | 66.2 |
| 1410 | 1410_2 | GTAATCCTAATTTAACCC | GTAatcctaatttaaCCC | 34.2 |
| 1412 | 1412_1 | AGTAATCCTAATTTAACC | AGTAatcctaatttaaCC | 42.7 |
| 1413 | 1413_1 | TCATTTATCACTACCACA | TCAtttatcactaccACA | 26.5 |
| 1414 | 1414_1 | CATCATTTATCACTACCACA | CatcatttatcactacCACA | 46 |
| 1415 | 1415_1 | CATTTATCACTACCACA | CAtttatcactacCACA | 19.4 |
| 1416 | 1416_1 | ATCATTTATCACTACCACA | ATcatttatcactacCACA | 16.8 |
| 1416 | 1416_2 | ATCATTTATCACTACCACA | ATCAtttatcactaccaCA | 14.1 |
| 1417 | 1417_1 | ACATCATTTATCACTACCACA | ACatcatttatcactaccACA | 53.4 |
| 1418 | 1418_1 | TCATTTATCACTACCAC | TCAtttatcactacCAC | 18.9 |
| 1419 | 1419_1 | ATCATTTATCACTACCAC | ATcatttatcactaCCAC | 21.8 |
| 1420 | 1420_1 | CATCATTTATCACTACCAC | CATcatttatcactacCAC | 25.1 |
| 1421 | 1421_1 | AACATCATTTATCACTACCAC | AACatcatttatcactacCAC | 30.5 |
| 1421 | 1421_2 | AACATCATTTATCACTACCAC | AacatcatttatcactaCCAC | 40.4 |
| 1420 | 1420_2 | CATCATTTATCACTACCAC | CatcatttatcactaCCAC | 34.3 |
| 1422 | 1422_1 | AACATCATTTATCACTACCA | AAcatcatttatcactACCA | 34 |
| 1423 | 1423_1 | CATCATTTATCACTACCA | CATCatttatcactacCA | 11.3 |
| 1424 | 1424_1 | TAACATCATTTATCACTACCA | TAacatcatttatcactaCCA | 63.1 |
| 1425 | 1425_1 | ACATCATTTATCACTACCA | ACATcatttatcactacCA | 19 |
| 1422 | 1422_2 | AACATCATTTATCACTACCA | AACatcatttatcactaCCA | 25 |
| 1424 | 1424_2 | TAACATCATTTATCACTACCA | TaacatcatttatcactACCA | 61.3 |
| 1425 | 1425_2 | ACATCATTTATCACTACCA | ACatcatttatcactACCA | 23.5 |
| 1426 | 1426_1 | TAACATCATTTATCACTACC | TAACatcatttatcactaCC | 33.6 |
| 1427 | 1427_1 | ACATCATTTATCACTACC | ACatcatttatcacTACC | 32.3 |
| 1428 | 1428_1 | TTAACATCATTTATCACTACC | TTAacatcatttatcactaCC | 75.5 |
| 1429 | 1429_1 | AACATCATTTATCACTACC | AACAtcatttatcactaCC | 37.3 |
| 1430 | 1430_1 | TTAACATCATTTATCACTAC | TTaacatcatttatcaCTAC | 69.1 |
| 1431 | 1431_1 | TAACATCATTTATCACTAC | TAacatcatttatcaCTAC | 66.6 |
| 1432 | 1432_1 | ATTAACATCATTTATCACTAC | ATtaacatcatttatcaCTAC | 84.2 |
| 1432 | 1432_2 | ATTAACATCATTTATCACTAC | ATtaacatcAtttatcaCTAC | 62.8 |
| 1433 | 1433_1 | ATTAACATCATTTATCACTA | ATTaacatcatttatcaCTA | 81.3 |
| 1434 | 1434_1 | TTAACATCATTTATCACTA | TTAacatcatttatcaCTA | 74.5 |
| 1435 | 1435_1 | TAATTAACATCATTTATCACT | TAattaacatcatttatCACT | 84.3 |
| 1435 | 1435_2 | TAATTAACATCATTTATCACT | TAattaacaTcatttatCACT | 43.3 |
| 1436 | 1436_1 | CTAATTAACATCATTTATCAC | CTaattaacatcatttaTCAC | 81.4 |
| 1436 | 1436_2 | CTAATTAACATCATTTATCAC | CTaattaacAtcatttaTCAC | 46.7 |
| 1437 | 1437_1 | CCTAATTAACATCATTTATCA | CCtaattaacatcatttaTCA | 93.8 |
| 1438 | 1438_1 | CTAATTAACATCATTTATCA | CTAattaacatcatttaTCA | 89.6 |
| 1439 | 1439_1 | CCTAATTAACATCATTTATC | CCTAattaacatcatttaTC | 69.4 |
| 1440 | 1440_1 | CCCTAATTAACATCATTTATC | CCctaattaacatcatttATC | 86.3 |
| 1441 | 1441_1 | CCTAATTAACATCATTTAT | CCTaattaacatcattTAT | 87.4 |
| 1442 | 1442_1 | CCTAATTAACATCATTTA | CCTAattaacatcattTA | 66 |
| 1443 | 1443_1 | CCCTAATTAACATCATTTA | CCCtaattaacatcattTA | 88.7 |
| 1444 | 1444_1 | GCCCTAATTAACATCATTT | GCCctaattaacatcatTT | 87.9 |
| 1445 | 1445_1 | CCCTAATTAACATCATTT | CCCTaattaacatcatTT | 75.6 |
| 1446 | 1446_1 | CGGCCCTAATTAACAT | CGGCcctaattaacAT | 103 |
| 1447 | 1447_1 | CTCGGCCCTAATTAA | CTCggccctaatTAA | 57.4 |
| 1448 | 1448_1 | CACATATAACATATAAACACA | CACAtataacatataaacaCA | 61.7 |
| 1449 | 1449_1 | TCACATATAACATATAAACAC | TCAcatataacatataaaCAC | 43.6 |
| 1450 | 1450_1 | ACTATCACATATAACATATA | ACTAtcacatataacataTA | 58.5 |
| 1451 | 1451_1 | CACTATCACATATAACATATA | CACTatcacatataacataTA | 28.1 |
| 1452 | 1452_1 | CACTATCACATATAACATAT | CACtatcacatataacaTAT | 52 |
| 1453 | 1453_1 | CACTATCACATATAACATA | CACTatcacatataacaTA | 24.3 |
| 1454 | 1454_1 | CACTATCACATATAACAT | CACtatcacatataaCAT | 40.1 |
| 1455 | 1455_1 | CACTATCACATATAACA | CACTatcacatataaCA | 27 |
| 1456 | 1456_1 | CAAAGTTTTCCCATTAC | CAaagttttcccaTTAC | 21 |
| 1457 | 1457_1 | ACAAAGTTTTCCCATTA | ACAaagttttcccaTTA | 20.5 |
| 1458 | 1458_1 | TCAGTCCAACATAACTC | TCAGtccaacataacTC | 15.2 |
| 1459 | 1459_1 | CAGTCCAACATAACTC | CAGtccaacataaCTC | 23.5 |
| 1460 | 1460_1 | ATCAGTCCAACATAACTC | ATCAgtccaacataacTC | 13.7 |
| 1461 | 1461_1 | ATCAGTCCAACATAACT | ATCAgtccaacataaCT | 15.9 |
| 1462 | 1462_1 | TAAACATTAAACCCTCCCAAA | TAaacattaaaccctccCAAA | 87 |
| 1463 | 1463_1 | AACATTAAACCCTCCCAA | AAcattaaaccctcCCAA | 68.4 |
| 1464 | 1464_1 | TAAACATTAAACCCTCCCAA | TaaacattaaaccctcCCAA | 79.2 |
| 1465 | 1465_1 | AAACATTAAACCCTCCCAA | AAacattaaaccctcCCAA | 70.8 |
| 1466 | 1466_1 | TATAAACATTAAACCCTCCCA | TAtaaacattaaaccctccCA | 94 |
| 1467 | 1467_1 | AACATTAAACCCTCCC | AAcattaaacccTCCC | 78.3 |
| 1468 | 1468_1 | AAACATTAAACCCTCCC | AAacattaaacccTCCC | 89.4 |
| 1469 | 1469_1 | TAAACATTAAACCCTCCC | TAAacattaaaccctCCC | 72.9 |
| 1470 | 1470_1 | ATAAACATTAAACCCTCCC | AtaaacattaaacccTCCC | 86 |
| 1471 | 1471_1 | TATAAACATTAAACCCTCC | TAtaaacattaaaccCTCC | 91.1 |
| 1472 | 1472_1 | TAAACATTAAACCCTCC | TAaacattaaaccCTCC | 82.2 |
| 1473 | 1473_1 | ACTATAAACATTAAACCCTCC | ActataaacattaaaccCTCC | 86.5 |
| 1474 | 1474_1 | ATAAACATTAAACCCTCC | ATaaacattaaaccCTCC | 88.4 |
| 1475 | 1475_1 | AACTATAAACATTAAACCCTC | AActataaacattaaacCCTC | 92.6 |
| 1476 | 1476_1 | CTATAAACATTAAACCCTC | CTataaacattaaacCCTC | 82.9 |
| 1477 | 1477_1 | ACTATAAACATTAAACCCTC | ACtataaacattaaacCCTC | 89.8 |
| 1478 | 1478_1 | AAACTATAAACATTAAACCCT | AAactataaacattaaaCCCT | 98.9 |
| 1479 | 1479_1 | CTATAAACATTAAACCCT | CTataaacattaaaCCCT | 82.2 |
| 1480 | 1480_1 | ACTATAAACATTAAACCCT | ACtataaacattaaaCCCT | 86.6 |
| 1481 | 1481_1 | AACTATAAACATTAAACCCT | AActataaacattaaaCCCT | 89.5 |
| 1482 | 1482_1 | GCTTTAAACTATAAACATT | GCtttaaactataaaCATT | 58.2 |
| 1483 | 1483_1 | TGCTTTAAACTATAAACA | TGCTttaaactataaaCA | 57.2 |
| 1484 | 1484_1 | CAGATTTATCACTATTA | CAGAtttatcactatTA | 15.4 |
| 1485 | 1485_1 | TCACAGCCTATCACCAC | TCacagcctatcacCAC | 47.3 |
| 1485 | 1485_2 | TCACAGCCTATCACCAC | TCAcagcctatcaccAC | 46.3 |
| 1486 | 1486_1 | ATCACAGCCTATCACCA | AtcacagcctatcACCA | 56.9 |
| 1486 | 1486_2 | ATCACAGCCTATCACCA | ATCacagcctatcacCA | 23.7 |
| 1487 | 1487_1 | AATCACAGCCTATCACC | AATCacagcctatcaCC | 32.9 |
| 1487 | 1487_2 | AATCACAGCCTATCACC | AatcacagcctatCACC | 52.2 |
| 1488 | 1488_1 | ATCACAGCCTATCACC | AtcacagcctatCACC | 60.1 |
| 1489 | 1489_1 | GCGTCACCCAAATCAC | GCgtcacccaaatCAC | 11 |
| 1490 | 1490_1 | AGCGTCACCCAAATCA | AGmcgtcacccaaaTCA | 17.4 |
| 1491 | 1491_1 | AGCGTCACCCAAATC | AGmcgtcacccaAATC | 18.8 |
| 1492 | 1492_1 | CAGATCCTAAAATCACT | CAGAtcctaaaatcaCT | 71.8 |
| 1493 | 1493_1 | TCAGATCCTAAAATCAC | TCAgatcctaaaatCAC | 66.2 |
| 1494 | 1494_1 | AGTAAAACCAATCATCAT | AGTaaaaccaatcatCAT | 30.8 |
| 1495 | 1495_1 | AGTAAAACCAATCATCA | AGTaaaaccaatcaTCA | 24.2 |
| 1496 | 1496_1 | CCCTTCCATCTCTACTAAAA | CccttccatctctactaaAA | 89.7 |
| 1497 | 1497_1 | ATAACTACATAACAAACCCA | ATaactacataacaaaCCCA | 69.1 |
| 1498 | 1498_1 | AATAACTACATAACAAACCCA | AAtaactacataacaaaCCCA | 77.8 |
| 1499 | 1499_1 | AACTACATAACAAACCCA | AActacataacaaaCCCA | 62.9 |
| 1500 | 1500_1 | TAACTACATAACAAACCCA | TAactacataacaaaCCCA | 65 |
| 1501 | 1501_1 | ACTACATAACAAACCCA | ACtacataacaaaCCCA | 60.4 |
| 1502 | 1502_1 | CAATAACTACATAACAAACCC | CAAtaactacataacaaaCCC | 72.6 |
| 1503 | 1503_1 | ATAACTACATAACAAACCC | ATAactacataacaaaCCC | 60.2 |
| 1504 | 1504_1 | ACAATAACTACATAACAAACC | ACAataactacataacaaACC | 78.5 |
| 1504 | 1504_2 | ACAATAACTACATAACAAACC | ACAAtaactacataacaaaCC | 80.9 |
| 1505 | 1505_1 | TGAATTCACAATAACTACA | TGaattcacaataacTACA | 38.1 |
| 1506 | 1506_1 | GCACATTTTTCTTAAACT | GCACatttttcttaaaCT | 62.2 |
| 1507 | 1507_1 | GCTATACCTAAAACAATCT | GCTatacctaaaacaaTCT | 62.2 |
| 1508 | 1508_1 | GCTATACCTAAAACAATC | GCTAtacctaaaacaaTC | 68.9 |
| 1509 | 1509_1 | CCCTTGTAACTAAAAAT | CCCTtgtaactaaaaAT | 100 |
| 1510 | 1510_1 | CCCCTTGTAACTAAAAA | CCCCttgtaactaaaAA | 86.1 |
| 1511 | 1511_1 | CCCCTTGTAACTAAAA | CCCCttgtaactaaAA | 101 |
| 1512 | 1512_1 | ACCCCTTGTAACTAAA | ACCCcttgtaactaAA | 88.8 |
| 1513 | 1513_1 | CACCCCTTGTAACTAA | CAccccttgtaaCTAA | 80.4 |
| 1514 | 1514_1 | ACACCCCTTGTAACTA | ACACcccttgtaacTA | 72.4 |
| 1515 | 1515_1 | GCTAAAACTAATCATCT | GCTaaaactaatcaTCT | 72.2 |
| 1516 | 1516_1 | GGCTAAAACTAATCAT | GGCtaaaactaatCAT | 70.8 |
| 1517 | 1517_1 | TTACCCTTCATATATACATCT | TtacccttcatatatacaTCT | 89.4 |
| 1518 | 1518_1 | ATTACCCTTCATATATACATC | AttacccttcatatataCATC | 82.4 |
| 1519 | 1519_1 | TTACCCTTCATATATACATC | TTAcccttcatatatacATC | 56.3 |
| 1520 | 1520_1 | CATTACCCTTCATATATACAT | CAttacccttcatatataCAT | 84.2 |
| 1521 | 1521_1 | TTACCCTTCATATATACAT | TTAcccttcatatataCAT | 55.3 |
| 1522 | 1522_1 | ATTACCCTTCATATATACAT | ATTacccttcatatataCAT | 49.3 |
| 1523 | 1523_1 | ACATTACCCTTCATATATACA | ACAttacccttcatatataCA | 55.2 |
| 1523 | 1523_2 | ACATTACCCTTCATATATACA | AcattacccttcatataTACA | 63.4 |
| 1524 | 1524_1 | TTACCCTTCATATATACA | TTACccttcatatataCA | 46.9 |
| 1525 | 1525_1 | CATTACCCTTCATATATACA | CattacccttcatataTACA | 66 |
| 1526 | 1526_1 | ATTACCCTTCATATATACA | ATTAcccttcatatataCA | 36.7 |
| 1527 | 1527_1 | ATTACCCTTCATATATAC | ATTacccttcatataTAC | 46.6 |
| 1528 | 1528_1 | TTACCCTTCATATATAC | TTAcccttcatataTAC | 56.9 |
| 1529 | 1529_1 | CATTACCCTTCATATATAC | CATtacccttcatataTAC | 63.4 |
| 1530 | 1530_1 | ACATTACCCTTCATATATAC | ACAttacccttcatataTAC | 34.5 |
| 1531 | 1531_1 | TACATTACCCTTCATATATAC | TAcattacccttcatataTAC | 76.9 |
| 1532 | 1532_1 | CATTACCCTTCATATATA | CAttacccttcataTATA | 76.5 |
| 1533 | 1533_1 | TACATTACCCTTCATATATA | TACattacccttcatatATA | 36.5 |
| 1534 | 1534_1 | ATTACCCTTCATATATA | ATtacccttcataTATA | 78 |
| 1535 | 1535_1 | ACATTACCCTTCATATATA | ACattacccttcataTATA | 59.5 |
| 1536 | 1536_1 | CATTACCCTTCATATAT | CATtacccttcataTAT | 73.7 |
| 1537 | 1537_1 | ACATTACCCTTCATATAT | ACAttacccttcataTAT | 46.1 |
| 1538 | 1538_1 | TACATTACCCTTCATATAT | TACattacccttcataTAT | 36.9 |
| 1539 | 1539_1 | ACATTACCCTTCATATA | ACattacccttcaTATA | 54.2 |
| 1540 | 1540_1 | TACATTACCCTTCATATA | TAcattacccttcaTATA | 71.5 |
| 1541 | 1541_1 | TACATTACCCTTCATAT | TACattacccttcaTAT | 34.5 |
| 1542 | 1542_1 | GATTCTTATACTTACTA | GATtcttatacttaCTA | 46.2 |
| 1543 | 1543_1 | TGATTCTTATACTTACT | TGattcttatactTACT | 45.7 |
| 1544 | 1544_1 | ATGATTCTTATACTTACT | ATGAttcttatacttaCT | 54 |
| 1545 | 1545_1 | GCCTCATTTTTACCTTT | GCctcalllllaccTTT | 82.6 |
| 1546 | 1546_1 | ACCAATCTTCTATTTTA | ACCAatcttctatttTA | 94.8 |
| 1547 | 1547_1 | CAACCAATCTTCTATTTTA | CAACcaatcttctatttTA | 90.3 |
| 1548 | 1548_1 | GCAACCAATCTTCTATTTT | GCAAccaatcttctattTT | 88.3 |
| 1549 | 1549_1 | GCAACCAATCTTCTATTT | GCAaccaatcttctaTTT | 85 |
| 1550 | 1550_1 | GCAACCAATCTTCTATT | GCaaccaatcttcTATT | 87.3 |
| 1551 | 1551_1 | TGCAACCAATCTTCTATT | TGCaaccaatcttctaTT | 90.2 |
| 1552 | 1552_1 | TAACTGCAACCAATCTT | TAactgcaaccaaTCTT | 88.2 |
| 1553 | 1553_1 | TGAATACAACACACATCA | TGAatacaacacacaTCA | 97.4 |
| 1554 | 1554_1 | ATGAATACAACACACATCA | ATGAatacaacacacatCA | 84.4 |
| 1555 | 1555_1 | TAAAAATATAACTACTCCT | TAaaaatataactacTCCT | 99.8 |
| 1556 | 1556_1 | GTAAAAATATAACTACTCC | GTaaaaatataactaCTCC | 93.7 |
| 1557 | 1557_1 | TCAACTGATACCCACAA | TCAactgatacccaCAA | 57.7 |
| 1558 | 1558_1 | TGTCTTAACATTTTTCTT | TGTCttaacatttttcTT | 63.1 |
| 1559 | 1559_1 | CCACTTCAAACTTTTAATTAA | CCAcftcaaacttttaatTAA | 85 |
| 1560 | 1560_1 | CCACTTCAAACTTTTAATTA | CCACttcaaacttttaatTA | 84.9 |
| 1561 | 1561_1 | CCCACTTCAAACTTTTAATTA | CCcacttcaaacttttaaTTA | 88.7 |
| 1562 | 1562_1 | CCACTTCAAACTTTTAATT | CCACftcaaacttttaaTT | 79.1 |
| 1563 | 1563_1 | CCCACTTCAAACTTTTAATT | CCCacftcaaacttttaaTT | 86.2 |
| 1564 | 1564_1 | ACCCACTTCAAACTTTTAATT | ACCcacftcaaacttttaaTT | 100 |
| 1565 | 1565_1 | CCACTTCAAACTTTTAAT | CCACttcaaacttttaAT | 85.3 |
| 1566 | 1566_1 | ACCCACTTCAAACTTTTAAT | ACCcacftcaaacttttAAT | 88.8 |
| 1567 | 1567_1 | AACCCACTTCAAACTTTTAAT | AACCcacttcaaacttttaAT | 92.3 |
| 1568 | 1568_1 | CCCACTTCAAACTTTTAA | CCCacttcaaactttTAA | 79.9 |
| 1569 | 1569_1 | ACCCACTTCAAACTTTTAA | ACCcacttcaaactaTAA | 82.5 |
| 1570 | 1570_1 | CCCACTTCAAACTTTTA | CCCacttcaaactttTA | 79.6 |
| 1571 | 1571_1 | ACCCACTTCAAACTTTTA | ACCcacttcaaacttTTA | 77.2 |
| 1572 | 1572_1 | AACCCACTTCAAACTTTTA | AACCcacttcaaactttTA | 86.2 |
| 1573 | 1573_1 | ACCCACTTCAAACTTTT | ACCCacttcaaacttTT | 93.3 |
| 1574 | 1574_1 | AACCCACTTCAAACTTTT | AACCcacttcaaacttTT | 82.7 |
| 1575 | 1575_1 | AACCCACTTCAAACTTT | AACCcacttcaaactTT | 85.8 |
| 1576 | 1576_1 | GGACTCTATTAATCAA | GGActctattaatCAA | 91.7 |
| 1577 | 1577_1 | GAATATTCTACTCTTCT | GAatattctactcTTCT | 95.3 |
| 1578 | 1578_1 | CTGTATTTACCAATTCAA | CTGtatttaccaattCAA | 90.8 |
| 1579 | 1579_1 | CTGTATTTACCAATTCA | CTGTatttaccaattCA | 88.7 |
| 1580 | 1580_1 | ACTGTATTTACCAATTCA | ACTGtatttaccaattCA | 97.3 |
| 1581 | 1581_1 | ACTGTATTTACCAATTC | ACTGtatttaccaatTC | 104 |
| 1582 | 1582_1 | CACTGTATTTACCAATT | CACTgtatttaccaaTT | 91.1 |
| 1583 | 1583_1 | TCACTGTATTTACCAAT | TCACtgtatttaccaAT | 98.6 |
| 1584 | 1584_1 | CCAACTACTTTACTTTTCAAA | CCaactactttacttttCAAA | 84.3 |
| 1585 | 1585_1 | CCAACTACTTTACTTTTCAA | CCaactactttactttTCAA | 80 |
| 1586 | 1586_1 | ACCAACTACTTTACTTTTCAA | ACcaactactttactttTCAA | 85.1 |
| 1585 | 1585_2 | CCAACTACTTTACTTTTCAA | CCAactactttacttttCAA | 75.2 |
| 1587 | 1587_1 | CCAACTACTTTACTTTTCA | CCAactactttacttttCA | 71.9 |
| 1588 | 1588_1 | TACCAACTACTTTACTTTTCA | TaccaactactttacttTTCA | 82.8 |
| 1587 | 1587_2 | CCAACTACTTTACTTTTCA | CCAactactttactttTCA | 67.7 |
| 1589 | 1589_1 | ACCAACTACTTTACTTTTCA | ACcaactactttactttTCA | 84 |
| 1590 | 1590_1 | TACCAACTACTTTACTTTTC | TACcaactactttacttTTC | 75.3 |
| 1591 | 1591_1 | GTACCAACTACTTTACTTT | GTACcaactactttactTT | 75.8 |
| 1592 | 1592_1 | GTACCAACTACTTTACTT | GTAccaactactttaCTT | 65.7 |
| 1593 | 1593_1 | GTACCAACTACTTTACT | GTACcaactactttaCT | 74.5 |
| 1594 | 1594_1 | TGTACCAACTACTTTACT | TGtaccaactacttTACT | 87.1 |
| 1595 | 1595_1 | TTGTACCAACTACTTTAC | TTGtaccaactacttTAC | 73.3 |
| 1596 | 1596_1 | GTACCAACTACTTTAC | GTAccaactacttTAC | 72.5 |
| 1597 | 1597_1 | TGTACCAACTACTTTAC | TGTaccaactacttTAC | 66 |
| 1598 | 1598_1 | TTGTACCAACTACTTTA | TTGTaccaactacttTA | 49.3 |
| 1599 | 1599_1 | ATTTCATTTTTCTTTTAATA | ATTtcatttttcttttaATA | 98.6 |
| 1599 | 1599_2 | ATTTCATTTTTCTTTTAATA | ATTTcatttttcttttaaTA | 90.7 |
| 1600 | 1600_1 | CCTAATTTCATTTTTCTTTT | CCtaatttcatttttcTTTT | 69.2 |
| 1601 | 1601_1 | TCCTAATTTCATTTTTCTTT | TCctaatttcatttttCTTT | 47 |
| 1602 | 1602_1 | TTCTTCATTATACCATCAAAT | TTCTtcattataccatcaaAT | 29.4 |
| 1603 | 1603_1 | TTTCTTCATTATACCATCAAA | TTTCttcattataccatcaAA | 24.1 |
| 1604 | 1604_1 | TTTTCTTCATTATACCATCAA | TTttcttcattataccaTCAA | 14.3 |
| 1605 | 1605_1 | TCTTCATTATACCATCAA | TCttcattataccaTCAA | 5.02 |
| 1606 | 1606_1 | TTTCTTCATTATACCATCAA | TTtcttcattataccaTCAA | 21.2 |
| 1607 | 1607_1 | TTCTTCATTATACCATCAA | TTCttcattataccatCAA | 5.83 |
| 1608 | 1608_1 | ATATTTTCTTCATTATACCAT | AtattttcttcattataCCAT | 76.1 |
| 1609 | 1609_1 | ATATTTTCTTCATTATACCA | ATattttcttcattataCCA | 40.2 |
| 1610 | 1610_1 | AATATTTTCTTCATTATACCA | AATattacttcattataCCA | 37 |
| 1611 | 1611_1 | AAATATTTTCTTCATTATACC | AAatattttcttcattaTACC | 23.4 |
| 1612 | 1612_1 | ATATTTTCTTCATTATACC | ATattttcttcattaTACC | 14.2 |
| 1613 | 1613_1 | AATATTTTCTTCATTATACC | AATAttttcttcattataCC | 68 |
| 1614 | 1614_1 | TAAATATTTTCTTCATTATA | TAaatattttcttcatTATA | 96.8 |
| 1615 | 1615_1 | TTTTCCTTCATCTACTTCT | TTTtccttcatctacttCT | 42.8 |
| 1616 | 1616_1 | ATTTTCCTTCATCTACTTCT | ATtttccttcatctacttCT | 76 |
| 1617 | 1617_1 | AATTTTCCTTCATCTACTTC | AATTttccttcatctactTC | 54.9 |
| 1618 | 1618_1 | AGAATTTTCCTTCATCTA | AgaattttccttcaTCTA | 58 |
| 1619 | 1619_1 | CAGAATTTTCCTTCATCT | CAgaattttccttcATCT | 23.5 |
| 1620 | 1620_1 | TCAGAATTTTCCTTCATC | TCAgaattttccttcaTC | 29.7 |
| 1621 | 1621_1 | CTAGAAATATCTCACATT | CTAGaaatatctcacaTT | 64.6 |
| 1622 | 1622_1 | CTAGAAATATCTCACAT | CTAgaaatatctcaCAT | 75.5 |
| 1623 | 1623_1 | ACTAGAAATATCTCACA | ACTAgaaatatctcaCA | 53.2 |
| 1624 | 1624_1 | ATTAGCCATTAATCTAT | ATtagccattaatCTAT | 71.9 |
| 1625 | 1625_1 | TTGTTACAAAATAATCCA | TTgttacaaaataaTCCA | 12 |
| 1625 | 1625_2 | TTGTTACAAAATAATCCA | TTGttacaaaataatCCA | 23.8 |
| 1626 | 1626_1 | TTATTTTTTACATTAACTA | TTAttttttacattaaCTA | 92.1 |
| 1627 | 1627_1 | TGCCAAAATACTAACATCA | TGCcaaaatactaacaTCA | 32 |
| 1628 | 1628_1 | GCCAAAATACTAACATCA | GCCaaaatactaacaTCA | 27.8 |
| 1629 | 1629_1 | TGCCAAAATACTAACATC | TGCCaaaatactaacaTC | 61.5 |
| 1630 | 1630_1 | GAGTACAACACTTACA | GAGTacaacacttaCA | 31.8 |
| 1631 | 1631_1 | CACATCCATTCATTTTAT | CACatccattcatttTAT | 30.6 |
| 1632 | 1632_1 | CCACATCCATTCATTTTAT | CCAcatccattcattttAT | 21.7 |
| 1633 | 1633_1 | CCACATCCATTCATTTTA | CCacatccattcattTTA | 20 |
| 1634 | 1634_1 | TATGCCACATCCATTCAT | TatgccacatccattCAT | 47 |
| 1635 | 1635_1 | TTATGCCACATCCATTCA | TtatgccacatccaTTCA | 20.7 |
| 1636 | 1636_1 | TATGCCACATCCATTCA | TAtgccacatccattCA | 43.3 |
| 1637 | 1637_1 | TTATGCCACATCCATTC | TtatgccacatccATTC | 19.5 |
| 1638 | 1638_1 | ATTATGCCACATCCATT | ATtatgccacatcCATT | 25.1 |
| 1639 | 1639_1 | AGTTTCATATTTTTAATC | AGTttcatatttttaATC | 65.9 |
| 1640 | 1640_1 | ATCACTGCACACTTTCC | ATCactgcacactttCC | 12.9 |
| 1641 | 1641_1 | AAGCTCTTTCCAAATTCT | AAGCtctttccaaattCT | 34.6 |
| 1642 | 1642_1 | TAGTTCTTAACTCTTCTC | TagttcttaactctTCTC | 19.2 |
| 1643 | 1643_1 | TTAGTTCTTAACTCTTC | TTAGttcttaactctTC | 18 |
| 1644 | 1644_1 | AGCTTCAAATACTCAAA | AGCTtcaaatactcaAA | 74.5 |
| 1645 | 1645_1 | TTTCAAAGCCACACCTA | TttcaaagccacaCCTA | 66.9 |
| 1646 | 1646_1 | AATATCCTCATTACCCATT | AATAtcctcattacccaTT | 52.3 |
| 1647 | 1647_1 | TATCCTCATTACCCATT | TAtcctcattaccCATT | 53.4 |
| 1647 | 1647_2 | TATCCTCATTACCCATT | TATCctcattacccaTT | 22.3 |
| 1648 | 1648_1 | ATATCCTCATTACCCATT | ATAtcctcattacccATT | 55.8 |
| 1649 | 1649_1 | AATATCCTCATTACCCAT | AAtatcctcattacCCAT | 46.1 |
| 1650 | 1650_1 | TAATATCCTCATTACCCAT | TAAtatcctcattaccCAT | 58.3 |
| 1651 | 1651_1 | TTAATATCCTCATTACCCAT | TTaatatcctcattaccCAT | 61.8 |
| 1652 | 1652_1 | ATATCCTCATTACCCAT | ATAtcctcattaccCAT | 56.2 |
| 1653 | 1653_1 | AATATCCTCATTACCCA | AAtatcctcattaCCCA | 49.7 |
| 1654 | 1654_1 | TAATATCCTCATTACCCA | TAATatcctcattaccCA | 45.6 |
| 1655 | 1655_1 | TTTAATATCCTCATTACCCA | TttaatatcctcattacCCA | 67.5 |
| 1656 | 1656_1 | TTAATATCCTCATTACCCA | TTaatatcctcattacCCA | 36 |
| 1656 | 1656_2 | TTAATATCCTCATTACCCA | TTAAtatcctcattaccCA | 57.9 |
| 1654 | 1654_2 | TAATATCCTCATTACCCA | TAAtatcctcattacCCA | 40 |
| 1653 | 1653_2 | AATATCCTCATTACCCA | AATatcctcattacCCA | 44.8 |
| 1657 | 1657_1 | ATTTAATATCCTCATTACCC | AtttaatatcctcattaCCC | 59.9 |
| 1658 | 1658_1 | TAATATCCTCATTACCC | TAATatcctcattacCC | 32.9 |
| 1659 | 1659_1 | TTAATATCCTCATTACCC | TTAAtatcctcattacCC | 42 |
| 1660 | 1660_1 | TTTAATATCCTCATTACCC | TttaatatcctcattACCC | 41.1 |
| 1661 | 1661_1 | AATTTAATATCCTCATTACCC | AatttaatatcctcattaCCC | 61 |
| 1662 | 1662_1 | TTTAATATCCTCATTACC | TTTAatatcctcattaCC | 60.6 |
| 1663 | 1663_1 | AATTTAATATCCTCATTACC | AAtttaatatcctcatTACC | 58.8 |
| 1664 | 1664_1 | TTAATATCCTCATTACC | TTaatatcctcatTACC | 42.3 |
| 1665 | 1665_1 | AAATTTAATATCCTCATTACC | AAatttaatatcctcatTACC | 55.9 |
| 1666 | 1666_1 | ATTTAATATCCTCATTACC | ATttaatatcctcatTACC | 55.5 |
| 1667 | 1667_1 | TAAATTTAATATCCTCATTAC | TAaatttaatatcctcaTTAC | 78 |
| 1668 | 1668_1 | TTAAATTTAATATCCTCATTA | TTAaatttaatatcctcaTTA | 95.2 |
| 1669 | 1669_1 | CTTAAATTTAATATCCTCATT | CTtaaatttaatatcctCATT | 73.2 |
| 1670 | 1670_1 | TCTTAAATTTAATATCCTCAT | TCttaaatttaatatccTCAT | 46.8 |
| 1671 | 1671_1 | TCTTAAATTTAATATCCTCA | TCttaaatttaatatcCTCA | 29.8 |
| 1672 | 1672_1 | TTCTTAAATTTAATATCCTCA | TTCttaaatttaatatccTCA | 35 |
| 1673 | 1673_1 | TTCTTAAATTTAATATCCTC | TTcttaaatttaatatCCTC | 36.2 |
| 1674 | 1674_1 | TCTTAAATTTAATATCCTC | TCttaaatttaatatCCTC | 25.1 |
| 1675 | 1675_1 | TTCTTAAATTTAATATCCT | TTCttaaatttaatatCCT | 46.9 |
| 1676 | 1676_1 | TCTTAAATTTAATATCCT | TCttaaatttaataTCCT | 50.9 |
| 1677 | 1677_1 | AATAGCCTTTATTCTAC | AAtagcctttattCTAC | 33.6 |
| 1678 | 1678_1 | CAGCAACAATTATTAATA | CAGCaacaattattaaTA | 70.5 |
| 1679 | 1679_1 | CCAGCAACAATTATTAAT | CCAGcaacaattattaAT | 64.2 |
| 1680 | 1680_1 | ACCAGCAACAATTATTAA | ACCagcaacaattatTAA | 20.5 |
| 1680 | 1680_2 | ACCAGCAACAATTATTAA | ACCAgcaacaattattAA | 39.7 |
| 1681 | 1681_1 | ACCAGCAACAATTATTA | ACCAgcaacaattatTA | 39.4 |
| 1682 | 1682_1 | TACCAGCAACAATTATT | TACCagcaacaattaTT | 26.4 |
| 1683 | 1683_1 | CCCCAAATCTAAAACACTTC | CCccaaatctaaaacacTTC | 79.4 |
| 1684 | 1684_1 | AACCCCAAATCTAAAACACTT | AACCccaaatctaaaacacTT | 82 |
| 1685 | 1685_1 | CCCCAAATCTAAAACACTT | CCCcaaatctaaaacacTT | 86.4 |
| 1686 | 1686_1 | AACCCCAAATCTAAAACACT | AACCccaaatctaaaacaCT | 75.2 |
| 1687 | 1687_1 | ACCCCAAATCTAAAACACT | ACcccaaatctaaaaCACT | 72.5 |
| 1688 | 1688_1 | ACCCCAAATCTAAAACAC | ACCccaaatctaaaaCAC | 80.9 |
| 1689 | 1689_1 | GCAAATATTCACAAATCCT | GCAaatattcacaaatCCT | 20.7 |
| 1689 | 1689_2 | GCAAATATTCACAAATCCT | GCaaatattcacaaaTCCT | 29.3 |
| 1690 | 1690_1 | ACTATTTAACACACATTATCA | ACTatttaacacacattaTCA | 36.6 |
| 1691 | 1691_1 | CTATTTAACACACATTATCA | CTAtttaacacacattaTCA | 49.6 |
| 1692 | 1692_1 | TACTATTTAACACACATTATC | TACTatttaacacacattaTC | 52.4 |
| 1693 | 1693_1 | ACTATTTAACACACATTATC | ACTAtttaacacacattaTC | 51.8 |
| 1694 | 1694_1 | TACTATTTAACACACATTAT | TACtatttaacacacatTAT | 91.1 |
| 1695 | 1695_1 | CTACTATTTAACACACATTAT | CTActatttaacacacatTAT | 72.7 |
| 1696 | 1696_1 | CTACTATTTAACACACATTA | CTACtatttaacacacatTA | 47.4 |
| 1697 | 1697_1 | ACTACTATTTAACACACATTA | ACTActatttaacacacatTA | 38.3 |
| 1698 | 1698_1 | CTACTATTTAACACACATT | CTACtatttaacacacaTT | 41.6 |
| 1699 | 1699_1 | ACTACTATTTAACACACATT | ACtactatttaacacaCATT | 40.3 |
| 1700 | 1700_1 | ACTACTATTTAACACACAT | ACTactatttaacacaCAT | 36.8 |
| 1701 | 1701_1 | CTACTATTTAACACACA | CTACtatttaacacaCA | 45.9 |
| 1702 | 1702_1 | ACTACTATTTAACACACA | ACTActatttaacacaCA | 32.6 |
| 1703 | 1703_1 | TATAGACCCTTAATATT | TATAgacccttaataTT | 41.4 |
| 1704 | 1704_1 | TTATAGACCCTTAATAT | TTAtagacccttaaTAT | 68.5 |
| 1705 | 1705_1 | CATCACAAAATAACCTATCAT | CAtcacaaaataacctaTCAT | 86.8 |
| 1706 | 1706_1 | TCATCACAAAATAACCTATCA | TCAtcacaaaataacctaTCA | 67.4 |
| 1707 | 1707_1 | TTCATCACAAAATAACCTATC | TTCAtcacaaaataacctaTC | 49 |
| 1708 | 1708_1 | TTCATCACAAAATAACCTA | TTcatcacaaaataaCCTA | 76.4 |
| 1709 | 1709_1 | TTTCATCACAAAATAACCTA | TTtcatcacaaaataaCCTA | 88.6 |
| 1710 | 1710_1 | TCATCACAAAATAACCTA | TCatcacaaaataaCCTA | 59.2 |
| 1711 | 1711_1 | TTTTCATCACAAAATAACCTA | TTttcatcacaaaataaCCTA | 86.1 |
| 1712 | 1712_1 | ATTTTCATCACAAAATAACCT | ATTttcatcacaaaataaCCT | 64.8 |
| 1713 | 1713_1 | TATTTTCATCACAAAATAACC | TATTttcatcacaaaataaCC | 76.9 |
| 1713 | 1713_2 | TATTTTCATCACAAAATAACC | TATTttcatcaCaaaataaCC | 56 |
| 1714 | 1714_1 | GTATTTTCATCACAAAATA | GTAT1f1catcacaaaaTA | 47 |
| 1715 | 1715_1 | TTACCTAGATCACTCC | TtacctagatcaCTCC | 73.1 |
| 1716 | 1716_1 | CTTACCTAGATCACTC | CTTacctagatcaCTC | 81.5 |
| 1717 | 1717_1 | CCTTACCTAGATCACT | CCTtacctagatcaCT | 95.9 |
| 1718 | 1718_1 | TAACTGCTCCTTAATCC | TAActgctccttaatCC | 34.8 |
| 1719 | 1719_1 | TCTAGCAATCCTCTCCT | TCtagcaatcctctcCT | 64.2 |
| 1720 | 1720_1 | TTCTAGCAATCCTCTCC | TtctagcaatcctcTCC | 70.4 |
| 1721 | 1721_1 | TTTTCACCTACTAATATTCAT | TTttcacctactaatatTCAT | 55.3 |
| 1722 | 1722_1 | TTTCACCTACTAATATTCAT | TTtcacctactaatatTCAT | 66.2 |
| 1723 | 1723_1 | TTCACCTACTAATATTCAT | TTCacctactaatattCAT | 17.2 |
| 1724 | 1724_1 | TCACCTACTAATATTCAT | TCAcctactaatattCAT | 23.5 |
| 1725 | 1725_1 | TCACCTACTAATATTCA | TCAcctactaatatTCA | 21.1 |
| 1726 | 1726_1 | TTTCACCTACTAATATTCA | TTTCacctactaatattCA | 16.7 |
| 1727 | 1727_1 | TTTTCACCTACTAATATTCA | TTttcacctactaataTTCA | 31.3 |
| 1728 | 1728_1 | TTTTTCACCTACTAATATTCA | TTtttcacctactaataTTCA | 45.3 |
| 1729 | 1729_1 | TTCACCTACTAATATTCA | TTCAcctactaatattCA | 24.7 |
| 1730 | 1730_1 | ATTTTTCACCTACTAATATTC | ATTMcacctactaataTTC | 48.5 |
| 1731 | 1731_1 | TTTTTCACCTACTAATATTC | TTTttcacctactaataTTC | 31.5 |
| 1732 | 1732_1 | TATTTTTCACCTACTAATATT | TAtttttcacctactaaTATT | 90.2 |
| 1733 | 1733_1 | TATTTTTCACCTACTAATAT | TATttttcacctactaaTAT | 89.1 |
| 1734 | 1734_1 | TTATTTTTCACCTACTAATAT | TTAtttttcacctactaaTAT | 86.1 |
| 1735 | 1735_1 | TTATTTTTCACCTACTAATA | TTATttttcacctactaaTA | 52.9 |
| 1736 | 1736_1 | TATTTTTCACCTACTAATA | TATTtttcacctactaaTA | 54.9 |
| 1737 | 1737_1 | TTTATTTTTCACCTACTAATA | TTTAtttttcacctactaaTA | 52 |
| 1738 | 1738_1 | TTTATTTTTCACCTACTAA | TTtatttttcacctaCTAA | 51.2 |
| 1739 | 1739_1 | TTTATTTTTCACCTACTA | TTTatttttcacctaCTA | 19 |
| 1740 | 1740_1 | CTCAACTTCTACTACTAATT | CTCAacttctactactaaTT | 19.7 |
| 1741 | 1741_1 | TCTCAACTTCTACTACTAATT | TCTCaacttctactactaaTT | 25.8 |
| 1742 | 1742_1 | CTCTCAACTTCTACTACTAAT | CTCtcaacttctactactAAT | 43 |
| 1743 | 1743_1 | CTCAACTTCTACTACTAAT | CTCAacttctactactaAT | 20.1 |
| 1744 | 1744_1 | TCTCAACTTCTACTACTAAT | TCTCaacttctactactaAT | 22.8 |
| 1745 | 1745_1 | TCTCTCAACTTCTACTACTAA | TCtctcaacttctactacTAA | 58.4 |
| 1746 | 1746_1 | CTCAACTTCTACTACTAA | CTcaacttctactaCTAA | 47.3 |
| 1747 | 1747_1 | TCTCAACTTCTACTACTAA | TCtcaacttctactaCTAA | 56.3 |
| 1748 | 1748_1 | CTCAACTTCTACTACTA | CTCaacttctactaCTA | 10.7 |
| 1749 | 1749_1 | TTCTCTCAACTTCTACTACTA | TtctctcaacttctactaCTA | 79.1 |
| 1750 | 1750_1 | TCTCTCAACTTCTACTACTA | TCtctcaacttctactacTA | 61.2 |
| 1751 | 1751_1 | TCTCAACTTCTACTACTA | TCtcaacttctactaCTA | 66.8 |
| 1752 | 1752_1 | CTCTCAACTTCTACTACTA | CtctcaacttctactACTA | 61.7 |
| 1753 | 1753_1 | CTCTCAACTTCTACTACT | CTCtcaacttctactaCT | 37.9 |
| 1754 | 1754_1 | TCTCAACTTCTACTACT | TCtcaacttctacTACT | 51.1 |
| 1755 | 1755_1 | TCTCTCAACTTCTACTACT | TCtctcaacttctactACT | 44.2 |
| 1756 | 1756_1 | TTTCTCTCAACTTCTACTACT | TTtctctcaacttctactACT | 65.7 |
| 1757 | 1757_1 | TTCTCTCAACTTCTACTACT | TTCtctcaacttctactaCT | 33.5 |
| 1758 | 1758_1 | TTTCTCTCAACTTCTACTAC | TTtctctcaacttctacTAC | 67.9 |
| 1759 | 1759_1 | CTCTCAACTTCTACTAC | CTCtcaacttctacTAC | 34.1 |
| 1760 | 1760_1 | TTCTCTCAACTTCTACTAC | TtctctcaacttctaCTAC | 63.8 |
| 1761 | 1761_1 | TTTTCTCTCAACTTCTACTAC | TTTTctctcaacttctactAC | 20.6 |
| 1762 | 1762_1 | TCTCTCAACTTCTACTAC | TCtctcaacttctacTAC | 49.7 |
| 1763 | 1763_1 | TTTCTCTCAACTTCTACTA | TTtctctcaacttctaCTA | 60.2 |
| 1764 | 1764_1 | TTTTCTCTCAACTTCTACTA | TtttctctcaacttctACTA | 52.2 |
| 1765 | 1765_1 | TTTTTCTCTCAACTTCTACTA | TTTttctctcaacttctacTA | 40.2 |
| 1766 | 1766_1 | TCTCTCAACTTCTACTA | TCtctcaacttctaCTA | 47.5 |
| 1767 | 1767_1 | TTCTCTCAACTTCTACTA | TTCtctcaacttctacTA | 35.1 |
| 1768 | 1768_1 | TTTCTCTCAACTTCTACT | TTTCtctcaacttctaCT | 28.6 |
| 1769 | 1769_1 | TTTTCTCTCAACTTCTACT | TTTtctctcaacttctaCT | 44.1 |
| 1770 | 1770_1 | CTTTTTCTCTCAACTTCTACT | CtttttctctcaacttctaCT | 99.8 |
| 1771 | 1771_1 | TTTTTCTCTCAACTTCTACT | TTTttctctcaacttctaCT | 43.7 |
| 1772 | 1772_1 | CTTTTTCTCTCAACTTCTAC | CTTtttctctcaacttctAC | 36.2 |
| 1773 | 1773_1 | ACTTTTTCTCTCAACTTCTAC | ACTttttctctcaacttctAC | 35.6 |
| 1774 | 1774_1 | TTTTCTCTCAACTTCTAC | TtttctctcaacttCTAC | 38.6 |
| 1775 | 1775_1 | TTTTTCTCTCAACTTCTAC | TttttctctcaacttCTAC | 42.1 |
| 1776 | 1776_1 | CTTTTTCTCTCAACTTCTA | CTttttctctcaacttCTA | 41.2 |
| 1777 | 1777_1 | TACTTTTTCTCTCAACTTCTA | TactttttctctcaacttCTA | 69.4 |
| 1778 | 1778_1 | ACTTTTTCTCTCAACTTCTA | ActttttctctcaacttCTA | 66.2 |
| 1779 | 1779_1 | TTTTTCTCTCAACTTCTA | TttttctctcaactTCTA | 35.5 |
| 1780 | 1780_1 | TACTTTTTCTCTCAACTTCT | TActttttctctcaacttCT | 65 |
| 1781 | 1781_1 | TTACTTTTTCTCTCAACTTCT | TtactttttctctcaactTCT | 62.1 |
| 1782 | 1782_1 | TTACTTTTTCTCTCAACTTC | TTActttttctctcaactTC | 38.9 |
| 1783 | 1783_1 | TACTTTTTCTCTCAACTTC | TACtttttctctcaactTC | 34 |
| 1784 | 1784_1 | ACTTTTTCTCTCAACTTC | ActttttctctcaaCTTC | 19.7 |
| 1785 | 1785_1 | TTACTTTTTCTCTCAACTT | TTActttttctctcaaCTT | 22 |
| 1786 | 1786_1 | TACTTTTTCTCTCAACTT | TACtttttctctcaaCTT | 22.3 |
| 1787 | 1787_1 | TTACTTTTTCTCTCAACT | TTACtttttctctcaaCT | 11.6 |
| 1788 | 1788_1 | GTTACTTTTTCTCTCAACT | GTtactttttctctcAACT | 43.2 |
| 1789 | 1789_1 | GTTACTTTTTCTCTCAAC | GTtactttttctctCAAC | 29 |
| 1790 | 1790_1 | GTTACTTTTTCTCTCAA | GTtactttttctcTCAA | 5.53 |
| 1791 | 1791_1 | AGTTACTTTTTCTCTCAA | AGTtactttttctctCAA | 6.5 |
| 1792 | 1792_1 | CTTTTACATTCCCATTAACA | CTTTtacattcccattaaCA | 24.5 |
| 1793 | 1793_1 | CACTTTTACATTCCCATTAAC | CACttttacattcccattaAC | 25.3 |
| 1794 | 1794_1 | CTTTTACATTCCCATTAAC | CTtttacattcccatTAAC | 21.5 |
| 1795 | 1795_1 | ACTTTTACATTCCCATTAAC | ACttttacattcccatTAAC | 23 |
| 1796 | 1796_1 | ACTTTTACATTCCCATTAA | ACttttacattcccaTTAA | 30 |
| 1797 | 1797_1 | CTTTTACATTCCCATTAA | CTtttacattcccaTTAA | 27.4 |
| 1798 | 1798_1 | CACTTTTACATTCCCATTAA | CActtttacattcccaTTAA | 28 |
| 1798 | 1798_2 | CACTTTTACATTCCCATTAA | CACttttacattcccatTAA | 15.9 |
| 1799 | 1799_1 | TACACTTTTACATTCCCATTA | TAcacttttacattcccatTA | 52.2 |
| 1800 | 1800_1 | ACTTTTACATTCCCATTA | ACTtttacattcccaTTA | 13.1 |
| 1801 | 1801_1 | CACTTTTACATTCCCATTA | CActtttacattcccATTA | 15.7 |
| 1802 | 1802_1 | ACACTTTTACATTCCCATTA | ACacttttacattcccaTTA | 19.1 |
| 1802 | 1802_2 | ACACTTTTACATTCCCATTA | ACActtttacattcccatTA | 9.66 |
| 1803 | 1803_1 | CACTTTTACATTCCCATT | CActtttacattccCATT | 10.2 |
| 1804 | 1804_1 | TACACTTTTACATTCCCATT | TACacttttacattcccaTT | 10.3 |
| 1805 | 1805_1 | ACACTTTTACATTCCCATT | ACACttttacattcccaTT | 4.51 |
| 1805 | 1805_2 | ACACTTTTACATTCCCATT | ACacttttacattccCATT | 6.8 |
| 1806 | 1806_1 | TACACTTTTACATTCCCAT | TACacttttacattccCAT | 3.53 |
| 1806 | 1806_2 | TACACTTTTACATTCCCAT | TACActtttacattcccAT | 4.79 |
| 1807 | 1807_1 | TACACTTTTACATTCCCA | TACacttttacattccCA | 6.35 |
| 1808 | 1808_1 | GTACACTTTTACATTCCCA | GtacacttttacattcCCA | 3 |
| 1808 | 1808_2 | GTACACTTTTACATTCCCA | GTacacttttacattccCA | 16.3 |
| 1809 | 1809_1 | GTACACTTTTACATTCCC | GTAcacttttacattcCC | 4.33 |
| 1810 | 1810_1 | TACACTTTTACATTCCC | TACacttttacattcCC | 3.26 |
| 1811 | 1811_1 | TGTACACTTTTACATTCCC | TGtacacttttacattcCC | 12.3 |
| 1809 | 1809_2 | GTACACTTTTACATTCCC | GtacacttttacattCCC | 2.49 |
| 1812 | 1812_1 | TGTACACTTTTACATTCC | TGtacacttttacatTCC | 2.47 |
| 1813 | 1813_1 | CTGTACACTTTTACATTC | CTGtacacttttacaTTC | 1.89 |
| 1814 | 1814_1 | ATCTTATTTACATCTTCC | ATcttatttacatcTTCC | 5.41 |
| 1815 | 1815_1 | GAATCTTATTTACATCTTC | GAatcttatttacatCTTC | 25.8 |
| 1816 | 1816_1 | GAATCTTATTTACATCTT | GAatcttatttacaTCTT | 19.1 |
| 1817 | 1817_1 | TGAATCTTATTTACATCT | TGAatcttatttacaTCT | 41.3 |
| 1818 | 1818_1 | ATTCAGCTTTTTCAATC | ATTCagctttttcaaTC | 16.8 |
| 1819 | 1819_1 | TTAATTTTCCCTTCACTCCT | TtaattttcccttcactcCT | 85.8 |
| 1820 | 1820_1 | TTAATTTTCCCTTCACTCC | TtaattttcccttcactCC | 85.8 |
| 1821 | 1821_1 | TTAATTTTCCCTTCACTC | TtaattttcccttcACTC | 51 |
| 1822 | 1822_1 | GTTAATTTTCCCTTCACTC | GttaattttcccttcACTC | 27.2 |
| 1823 | 1823_1 | CAAAATTACTTCTTTTATCAT | CAaaattacttcttttaTCAT | 86.7 |
| 1823 | 1823_2 | CAAAATTACTTCTTTTATCAT | CAaaattacTtcttttaTCAT | 51.5 |
| 1824 | 1824_1 | CCAAAATTACTTCTTTTATCA | CCAaaattacttcttttaTCA | 31.3 |
| 1824 | 1824_2 | CCAAAATTACTTCTTTTATCA | CCaaaattacttcttttATCA | 36 |
| 1825 | 1825_1 | TCCAAAATTACTTCTTTTATC | TCcaaaattacttctttTATC | 40.9 |
| 1826 | 1826_1 | TCCAAAATTACTTCTTTTAT | TCCaaaattacttctttTAT | 50.2 |
| 1827 | 1827_1 | CCAAAATTACTTCTTTTAT | CCAaaattacttctttTAT | 70 |
| 1828 | 1828_1 | TTCCAAAATTACTTCTTTTAT | TTCcaaaattacttctttTAT | 64.9 |
| 1829 | 1829_1 | TCCAAAATTACTTCTTTTA | TCCAaaattacttctttTA | 36.9 |
| 1830 | 1830_1 | TTCCAAAATTACTTCTTTTA | TTCCaaaattacttctttTA | 52.2 |
| 1831 | 1831_1 | GTTCCAAAATTACTTCTTT | GTTCcaaaattacttctTT | 54.8 |
| 1832 | 1832_1 | GTTCCAAAATTACTTCTT | GTtccaaaattactTCTT | 12.5 |
| 1833 | 1833_1 | TGTTCCAAAATTACTTCT | TGTtccaaaattactTCT | 20.1 |
| 1834 | 1834_1 | ATGTTCCAAAATTACTTC | ATGTtccaaaattactTC | 23.8 |
| 1835 | 1835_1 | CATATTTTACTCTTTTTATT | CATAttttactctttttaTT | 90.6 |
| 1836 | 1836_1 | CCATATTTTACTCTTTTTAT | CCATattttactctttttAT | 35.4 |
| 1836 | 1836_2 | CCATATTTTACTCTTTTTAT | CCAtattttactcttaTAT | 60.8 |
| 1837 | 1837_1 | CCCATATTTTACTCTTTTTAT | CccatattttactctttTTAT | 75.8 |
| 1838 | 1838_1 | CATATTTTACTCTTTTTAT | CATattttactcttttTAT | 83.2 |
| 1839 | 1839_1 | CCCATATTTTACTCTTTTTA | CCcatattttactcttttTA | 81.1 |
| 1840 | 1840_1 | CCATATTTTACTCTTTTTA | CCatattttactcttTTTA | 24.7 |
| 1841 | 1841_1 | ACCCATATTTTACTCTTTTTA | AcccatattttactcttTTTA | 59 |
| 1842 | 1842_1 | CCATATTTTACTCTTTTT | CCATattttactctttTT | 21.6 |
| 1843 | 1843_1 | CCCATATTTTACTCTTTTT | CCcatattttactcttTTT | 77.2 |
| 1844 | 1844_1 | ACCCATATTTTACTCTTTTT | ACccatattttactctTTTT | 97.4 |
| 1845 | 1845_1 | TACCCATATTTTACTCTTTTT | TAcccatattttactcttTTT | 58.6 |
| 1846 | 1846_1 | TACCCATATTTTACTCTTTT | TACccatattttactctTTT | 20.4 |
| 1847 | 1847_1 | CCCATATTTTACTCTTTT | CCCatattttactcttTT | 93.2 |
| 1848 | 1848_1 | ACCCATATTTTACTCTTTT | ACCcatattttactcttTT | 21.8 |
| 1846 | 1846_2 | TACCCATATTTTACTCTTTT | TAcccatattttactcTTTT | 22.5 |
| 1849 | 1849_1 | TTACCCATATTTTACTCTTTT | TTAcccatattttactcttTT | 41.4 |
| 1850 | 1850_1 | TACCCATATTTTACTCTTT | TAcccatattttactCTTT | 18.9 |
| 1851 | 1851_1 | ACCCATATTTTACTCTTT | ACCcatattttactcTTT | 13.4 |
| 1852 | 1852_1 | TTACCCATATTTTACTCTTT | TTacccatattttactCTTT | 14.5 |
| 1853 | 1853_1 | TTTACCCATATTTTACTCTTT | TTTacccatattttactcTTT | 22.2 |
| 1852 | 1852_2 | TTACCCATATTTTACTCTTT | TTACccatattttactctTT | 16.7 |
| 1853 | 1853_2 | TTTACCCATATTTTACTCTTT | TTTAcccataactctTT | 16 |
| 1854 | 1854_1 | TTACCCATATTTTACTCTT | TTAcccatattttactCTT | 14 |
| 1855 | 1855_1 | TTTACCCATATTTTACTCTT | TTtacccatattttacTCTT | 14.9 |
| 1856 | 1856_1 | ACCCATATTTTACTCTT | ACCcatattttactCTT | 8.02 |
| 1857 | 1857_1 | TACCCATATTTTACTCTT | TACccatattttactCTT | 16.7 |
| 1858 | 1858_1 | TACCCATATTTTACTCT | TACccatattttacTCT | 22.3 |
| 1859 | 1859_1 | TTACCCATATTTTACTCT | TTACccatattttactCT | 15.2 |
| 1860 | 1860_1 | TTTACCCATATTTTACTCT | TTTAcccatattttactCT | 11.8 |
| 1861 | 1861_1 | TTACCCATATTTTACTC | TTAcccatattttaCTC | 24.4 |
| 1862 | 1862_1 | TTTACCCATATTTTACTC | TTTacccatattttaCTC | 14 |
| 1863 | 1863_1 | GTTTACCCATATTTTACTC | GTttacccatattttaCTC | 12.2 |
| 1864 | 1864_1 | GTTTACCCATATTTTACT | GTttacccatatttTACT | 24.9 |
| 1865 | 1865_1 | TGTTTACCCATATTTTAC | TGTttacccatatttTAC | 13.1 |
| 1866 | 1866_1 | GTTTACCCATATTTTAC | GTttacccatattTTAC | 13.2 |
| 1867 | 1867_1 | TGTTTACCCATATTTTA | TGTttacccatattTTA | 6.69 |
| 1868 | 1868_1 | TTCTTGCTTCAACCATC | TtcttgcttcaacCATC | 13.6 |
| 1869 | 1869_1 | GTTACCTCCCTTTATAT | GTtacctccctttatAT | 60.9 |
| 1870 | 1870_1 | GGTTACCTCCCTTTAT | GgttacctccctTTAT | 39 |
| 1871 | 1871_1 | AGGTTACCTCCCTTTA | AggttacctcccTTTA | 35.4 |
| 1872 | 1872_1 | ATGTTCTCTATCTCTATA | ATGttctctatctctATA | 53.3 |
| 1873 | 1873_1 | TATGTTCTCTATCTCTA | TAtgttctctatctCTA | 73.4 |
| 1874 | 1874_1 | AGATCAAACTAAAACCT | AGAtcaaactaaaaCCT | 88.7 |
| 1875 | 1875_1 | TGCCCAATTTCACCCAA | TGcccaatttcacccAA | 30.3 |
| 1876 | 1876_1 | TTTGCCCAATTTCACCC | TttgcccaatttcacCC | 53.3 |
| 1877 | 1877_1 | TTTTGCCCAATTTCACC | TTttgcccaatttcaCC | 57.8 |
| 1878 | 1878_1 | TGTATATCAACAATTCAT | TGTatatcaacaattCAT | 20.8 |
| 1879 | 1879_1 | ACATTTCTTTAAAATTTCCA | ACatttctttaaaattTCCA | 96.4 |
| 1879 | 1879_2 | ACATTTCTTTAAAATTTCCA | ACAtttctttaaaatttCCA | 96.6 |
| 1880 | 1880_1 | CACATTTCTTTAAAATTTCCA | CACAtttctttaaaatttcCA | 95.5 |
| 1879 | 1879_3 | ACATTTCTTTAAAATTTCCA | AcatttctttaaaattTCCA | 98.1 |
| 1879 | 1879_4 | ACATTTCTTTAAAATTTCCA | ACATttctttaaaatttcCA | 98 |
| 1881 | 1881_1 | CCACATTTCTTTAAAATTTCC | CcacatttctttaaaatTTCC | 90 |
| 1882 | 1882_1 | CACATTTCTTTAAAATTTCC | CAcatttctttaaaattTCC | 94.8 |
| 1882 | 1882_2 | CACATTTCTTTAAAATTTCC | CAcatttctttaaaatTTCC | 89.1 |
| 1882 | 1882_3 | CACATTTCTTTAAAATTTCC | CACAtttctttaaaatttCC | 94.4 |
| 1883 | 1883_1 | ACATTTCTTTAAAATTTCC | ACAtttctttaaaattTCC | 91.9 |
| 1882 | 1882_4 | CACATTTCTTTAAAATTTCC | CACatttctttaaaattTCC | 92.4 |
| 1884 | 1884_1 | CCACATTTCTTTAAAATTTC | CCACatttctttaaaattTC | 98.3 |
| 1885 | 1885_1 | ACCACATTTCTTTAAAATTTC | ACCAcatttctttaaaattTC | 97.5 |
| 1884 | 1884_2 | CCACATTTCTTTAAAATTTC | CCAcatttctttaaaattTC | 102 |
| 1884 | 1884_3 | CCACATTTCTTTAAAATTTC | CCacatttctttaaaaTTTC | 94.9 |
| 1884 | 1884_4 | CCACATTTCTTTAAAATTTC | CCAcatttctttaaaatTTC | 87.2 |
| 1886 | 1886_1 | ACCACATTTCTTTAAAATTT | ACCAcatttctttaaaatTT | 94.8 |
| 1887 | 1887_1 | ACAAAACCACATTTCTTTAA | ACAaaaccacatttcttTAA | 97.4 |
| 1888 | 1888_1 | CTGTTTTCAAATCATTTC | CTGTtttcaaatcattTC | 15.8 |
| 1889 | 1889_1 | GAACCATTACTATTATCAA | GAaccattactattaTCAA | 27.3 |
| 1890 | 1890_1 | AGAACCATTACTATTATCA | AGAaccattactattaTCA | 19.8 |
| 1891 | 1891_1 | AGAACCATTACTATTATC | AGaaccattactatTATC | 17.9 |
| 1892 | 1892_1 | CTAGAACCATTACTATTA | CTAGaaccattactatTA | 35.3 |
| 1893 | 1893_1 | TAGAACCATTACTATTA | TAGAaccattactatTA | 13.2 |
| 1894 | 1894_1 | CTAGAACCATTACTATT | CTAGaaccattactaTT | 32.1 |
| 1895 | 1895_1 | AGATTACCATCTTTCAAAA | AGATtaccatctttcaaAA | 59.5 |
| 1895 | 1895_2 | AGATTACCATCTTTCAAAA | AGAttaccatctttcaAAA | 54.1 |
| 1896 | 1896_1 | AGATTACCATCTTTCAAA | AGATtaccatctttcaAA | 50.6 |
| 1896 | 1896_2 | AGATTACCATCTTTCAAA | AGattaccatattCAAA | 42.3 |
| 1897 | 1897_1 | AGATTACCATCTTTCAA | AGAttaccatctttCAA | 32.4 |
| 1898 | 1898_1 | AAGATTACCATCTTTCA | AAGAttaccatattCA | 47.9 |
| 1899 | 1899_1 | CATGCTCACACATTTTAA | CATgctcacacatttTAA | 60.5 |
| 1899 | 1899_2 | CATGCTCACACATTTTAA | CAtgctcacacattTTAA | 70.3 |
| 1899 | 1899_3 | CATGCTCACACATTTTAA | CAtgctcacacatttTAA | 69.8 |
| 1899 | 1899_4 | CATGCTCACACATTTTAA | CATGctcacacattttAA | 55.9 |
| 1900 | 1900_1 | CTTAAGCTATCTAAACA | CTTAagctatctaaaCA | 82.6 |
| 1901 | 1901_1 | TGAACAATTCAACATTCA | TGAacaattcaacatTCA | 67.7 |
| 1902 | 1902_1 | GATCAAAAAACTTTCCCT | GAtcaaaaaactttCCCT | 76.1 |
| 1903 | 1903_1 | AGATCAAAAAACTTTCCCT | AGatcaaaaaactttCCCT | 70.4 |
| 1904 | 1904_1 | AGATCAAAAAACTTTCCC | AGAtcaaaaaactaCCC | 73.6 |
| 1905 | 1905_1 | TCCTAGATCAAAAAACT | TCCTagatcaaaaaaCT | 69.9 |
| 1906 | 1906_1 | ATTTTTTCTTCTCTTTTCA | ATTTtttcttcttttCA | 8.98 |
| 1907 | 1907_1 | TATTTTTTCTTCTCTTTTCA | TATtttttcttctcttttCA | 63.8 |
| 1908 | 1908_1 | ATATTTTTTCTTCTCTTTTC | ATattttttcttctctTTTC | 16.1 |
| 1909 | 1909_1 | TCTGCTTTAAAAACTCTC | TCtgctttaaaaacTCTC | 34.3 |
| 1910 | 1910_1 | CTCTGCTTTAAAAACTC | CTCtgctttaaaaaCTC | 51.6 |
| 1911 | 1911_1 | ACTACACAAACACATTCAA | ACtacacaaacacatTCAA | 37.6 |
| 1912 | 1912_1 | CAAACTACACAAACACATTCA | CAaactacacaaacacaTTCA | 41.2 |
| 1913 | 1913_1 | ACAAACTACACAAACACATTC | ACAaactacacaaacacaTTC | 63.1 |
| 1914 | 1914_1 | CAACAAACTACACAAACACAT | CAAcaaactacacaaacaCAT | 86.1 |
| 1915 | 1915_1 | CACAACAAACTACACAAACAC | CACaacaaactacacaaaCAC | 62.1 |
| 1916 | 1916_1 | TCACAACAAACTACACAAACA | TCACaacaaactacacaaaCA | 48.6 |
| 1917 | 1917_1 | TTCACAACAAACTACACAAAC | TTCAcaacaaactacacaaAC | 58.8 |
| 1918 | 1918_1 | ATTTCACAACAAACTACACAA | ATTtcacaacaaactacaCAA | 76.8 |
| 1919 | 1919_1 | CAATTTCACAACAAACTACAC | CAAtttcacaacaaactaCAC | 70.7 |
| 1920 | 1920_1 | TGTAACAATTTCACAACAA | TGTaacaatttcacaaCAA | 59.5 |
| 1921 | 1921_1 | TGTAACAATTTCACAACA | TGTAacaatttcacaaCA | 28.7 |
| 1922 | 1922_1 | TTAAGCCAACCCCACCA | TtaagccaaccccacCA | 83.1 |
| 1923 | 1923_1 | TTTAAGCCAACCCCACC | TttaagccaaccccACC | 69.2 |
| 1924 | 1924_1 | ATTTAAGCCAACCCCAC | AtttaagccaaccCCAC | 60.6 |
| 1925 | 1925_1 | CCAGTAATACAAATTATA | CCAGtaatacaaattaTA | 69.5 |
| 1926 | 1926_1 | CCCAGTAATACAAATTA | CCCAgtaatacaaatTA | 55.9 |
| 1927 | 1927_1 | TCCCAGTAATACAAATT | TCCCagtaatacaaaTT | 64.9 |
| 1928 | 1928_1 | ATCCCAGTAATACAAAT | ATCCcagtaatacaaAT | 65.9 |
| 1929 | 1929_1 | CTACTAGCATCACCACT | CtactagcatcacCACT | 19.8 |
| 1930 | 1930_1 | TTCTACTAGCATCACC | TtctactagcatCACC | 21.8 |
| 1931 | 1931_1 | CTTCTACTAGCATCAC | CTtctactagcaTCAC | 33.2 |
| 1932 | 1932_1 | TAAATTACTCATTAAATCCAT | TAaattactcattaaatCCAT | 77.8 |
| 1933 | 1933_1 | ATAAATTACTCATTAAATCCA | ATaaattactcattaaaTCCA | 52.4 |
| 1934 | 1934_1 | TAAATTACTCATTAAATCCA | TAaattactcattaaaTCCA | 51.6 |
| 1935 | 1935_1 | CATAAATTACTCATTAAATCC | CATaaattactcattaaaTCC | 58.5 |
| 1935 | 1935_2 | CATAAATTACTCATTAAATCC | CATaaattacTcattaaaTCC | 22.3 |
| 1936 | 1936_1 | GATTTATTTTTCTACTTA | GAtttatwtctaCTTA | 66 |
| 1937 | 1937_1 | ATACAACAAACAATTCACTTT | ATacaacaaacaattcaCTTT | 53.2 |
| 1937 | 1937_2 | ATACAACAAACAATTCACTTT | ATACaacaaacaattcactTT | 48.1 |
| 1938 | 1938_1 | CGATACAACAAACAATTCA | CGATacaacaaacaattCA | 23 |
| 1939 | 1939_1 | GAACATCCACACTAACAACA | GAACatccacactaacaaCA | 43.6 |
| 1940 | 1940_1 | ACATCCACACTAACAACA | ACAtccacactaacaACA | 65 |
| 1939 | 1939_2 | GAACATCCACACTAACAACA | GAAcatccacactaacaACA | 52 |
| 1939 | 1939_3 | GAACATCCACACTAACAACA | GAacatccacactaacAACA | 58.1 |
| 1941 | 1941_1 | GAACATCCACACTAACAAC | GAACatccacactaacaAC | 51.3 |
| 1941 | 1941_2 | GAACATCCACACTAACAAC | GAacatccacactaaCAAC | 63.3 |
| 1942 | 1942_1 | TGAACATCCACACTAACAA | TGAacatccacactaaCAA | 57.8 |
| 1943 | 1943_1 | TTGAACATCCACACTAACA | TTGAacatccacactaaCA | 60.3 |
| 1944 | 1944_1 | TGAACATCCACACTAACA | TGAAcatccacactaaCA | 42.6 |
| 1945 | 1945_1 | CATTGAACATCCACACTA | CATtgaacatccacaCTA | 59.4 |
| 1946 | 1946_1 | ATTGAACATCCACACTA | ATTgaacatccacaCTA | 50 |
| 1947 | 1947_1 | CATTGAACATCCACACT | CAttgaacatccaCACT | 43 |
| 1948 | 1948_1 | ACTCATTGAACATCCAC | ACtcattgaacatCCAC | 46.8 |
| 1949 | 1949_1 | TATCTTTATTTAATAATCTT | TATCtttatttaataatcTT | 93.4 |
| 1949 | 1949_2 | TATCTTTATTTAATAATCTT | TAtctttatttaataaTCTT | 96.9 |
| 1950 | 1950_1 | TCTCAAGCTTCACTCTA | TCtcaagcttcactcTA | 78.6 |
| 1951 | 1951_1 | GACAATATATTCCTCAATC | GACAatatattcctcaaTC | 73 |
| 1952 | 1952_1 | GACAATATATTCCTCAAT | GACAatatattcctcaAT | 82 |
| 1952 | 1952_2 | GACAATATATTCCTCAAT | GAcaatatattcctCAAT | 76.8 |
| 1953 | 1953_1 | TCCTGTAACAATTATAC | TCCtgtaacaattaTAC | 95.4 |
| 1954 | 1954_1 | ACCCAGAATAAAAACCAC | ACccagaataaaaaCCAC | 95.5 |
| 1955 | 1955_1 | TTCCACTTTCTTACTCCC | TtccactttcttactcCC | 96.6 |
| 1956 | 1956_1 | TTCCACTTTCTTACTCC | TtccactttcttacTCC | 86.3 |
| 1957 | 1957_1 | TTTCCACTTTCTTACTCC | TttccactttcttacTCC | 89.2 |
| 1958 | 1958_1 | TTTCCACTTTCTTACTC | TTTCcactttcttacTC | 89.2 |
| 1959 | 1959_1 | ATCCCTTTACCACTTTT | ATCcctttaccactTTT | 101 |
| 1960 | 1960_1 | CATCCCTTTACCACTTTT | CAtccctttaccactTTT | 98 |
| 1961 | 1961_1 | TCATCCCTTTACCACTTT | TCatccctttaccactTT | 101 |
| 1962 | 1962_1 | TCATCCCTTTACCACTT | TCAtccctttaccacTT | 96.9 |
| 1963 | 1963_1 | CTCATCCCTTTACCACTT | CtcatccctttaccacTT | 97.7 |
| 1964 | 1964_1 | GTCTACATCTAACCCC | GtctacatctaacCCC | 97 |
| 1965 | 1965_1 | AGTCTACATCTAACCCC | AGtctacatctaaccCC | 99.6 |
| 1966 | 1966_1 | CAGTCTACATCTAACCCC | CagtctacatctaaccCC | 97.4 |
| 1967 | 1967_1 | CAGTCTACATCTAACCC | CagtctacatctaaCCC | 99.5 |
| 1968 | 1968_1 | TCAGTCTACATCTAACCC | TCagtctacatctaacCC | 98.9 |
| 1969 | 1969_1 | AGTCTACATCTAACCC | AGTctacatctaacCC | 98.2 |
| 1970 | 1970_1 | TCAGTCTACATCTAACC | TCagtctacatctAACC | 98.3 |
| 1971 | 1971_1 | TTCAGTCTACATCTAACC | TTCagtctacatctaaCC | 98 |
| 1972 | 1972_1 | TTCAGTCTACATCTAAC | TTCAgtctacatctaAC | 98.7 |
| 1973 | 1973_1 | TTTCAGTCTACATCTAA | TTtcagtctacatCTAA | 90.1 |
| 1974 | 1974_1 | AGTTTTAACCACACCTCCT | AgttttaaccacacctcCT | 102 |
| 1975 | 1975_1 | GTTTTAACCACACCTCC | GTTttaaccacacctCC | 93.7 |
| 1976 | 1976_1 | AGTTTTAACCACACCTCC | AgttttaaccacaccTCC | 95 |
| 1977 | 1977_1 | AGTTTTAACCACACCTC | AGttttaaccacacCTC | 88.7 |
| 1978 | 1978_1 | GAGTTTTAACCACACC | GAGMtaaccacACC | 94.7 |
| 1979 | 1979_1 | CAGATCTTCTCTTTATTT | CAGatcttctctttaTTT | 96.3 |
| 1980 | 1980_1 | TGTTTTCAACAAAACATCA | TGTtttcaacaaaacaTCA | 89.9 |
| 1981 | 1981_1 | TGTTTTCAACAAAACATC | TGttacaacaaaaCATC | 97.5 |
| 1982 | 1982_1 | CTGTTTTCAACAAAACAT | CTGttttcaacaaaaCAT | 102 |
| 1983 | 1983_1 | TCTGTTTTCAACAAAACA | TCTGttacaacaaaaCA | 98 |
| 1984 | 1984_1 | ATCTTTCTAAAACTTACC | ATCTttctaaaacttaCC | 96.3 |
| 1985 | 1985_1 | CAGAATCTTTCTAAAACT | CAGAatctttctaaaaCT | 91.7 |
| 1986 | 1986_1 | CTACAGAATCTTTCTAA | CTacagaatctttCTAA | 97.6 |
| 1986 | 1986_2 | CTACAGAATCTTTCTAA | CTAcagaatctttcTAA | 95.6 |
| 1987 | 1987_1 | ATTTCCCTTTATTTCCCTT | AtttccctttatttccCTT | 92 |
| 1988 | 1988_1 | GTATTTCCCTTTATTTCC | GtatttccctttattTCC | 99.5 |

[0415] In the oligonucleotide compound column, capital letters represent beta-D-oxy LNA nucleosides, LNA cytosines are 5-methyl cytosine, lower case letters are DNA nucleosides, and all internucleoside linkages are phosphorothioate. ^{m}c represent 5-methyl cytosine DNA nucleosides (used in compounds 1490_1 and 1491_1).

### Example 4

### Materials and Methods:

[0416] The screening assay described in Example 2 was performed using a series of further oligonucleotide targeting human ATXN3 pre-mRNA using the qpCR: (ATXN3 exon 8-9(1) PrimeTime® XL qPCR Assay (IDT).

qPCR probe and primers set 2:
(SEQ ID NO: 1134)
Probe: 5′-/56-FAM/CTCCGCAGG/ZEN/GCT ATTCAGCT AAGT/
31ABkFQ/-3′
(SEQ ID NO: 1135)
Primer 1: 5′-AGT AAGATTTGT ACCTGATGTCTGT-3′
(SEQ ID NO: 1136)
Primer 2: 5′-CATGGAAGATGAGGAAGCAGAT-3′

### Results:

TABLE 6

| | | | | % of |
|---|---|---|---|---|
| | | | | ATXN3 |
| | | Oligonucleotide | Oligonucleotide | mRNA |
| SEQID | CMPID | Base Sequence | compound | remaining |
| 1110 | 1110_2 | ACATCATTTATCACTACCAC | ACatcatttatcactacCAC | 44 |
| 1102 | 1102_2 | TATCTCAAACTATCCCCA | TatctcaaactatccCCA | 74 |
| 1104 | 1104_2 | TCCCCTAAATAATTTAATCA | TCCcctaaataatttaaTCA | 78 |
| 1116 | 1116_2 | TCTTCATTATACCATCAAAT | TCTTcattataccatcaaAT | 12 |
| 1121 | 1121_2 | CTCTCAACTTCTACTACTAA | CtctcaacttctactaCTAA | 68 |
| 1114 | 1114_2 | TGATTCTTATACTTACTA | TGATtcttatacttacTA | 64 |
| 1120 | 1120_2 | CATCACAAAATAACCTATCA | CATCacaaaataacctatCA | 38 |
| 1100 | 1100_2 | CCCCATTCAAATATTTATT | CCCcattcaaatatttATT | 79 |
| 1112 | 1112_2 | TCAGATCCTAAAATCACT | TCAGatcctaaaatcaCT | 65 |
| 1123 | 1123_2 | CCAAAATTACTTCTTTTATC | CCaaaattacttctttTATC | 37 |
| 1117 | 1117_2 | GTTTCATATTTTTAATCC | GTftcatatttttaATCC | 10 |
| 1099 | 1099_2 | CCAAAAGAAACCAAACCC | CCaaaagaaaccaaACCC | 88 |
| 1109 | 1109_2 | TGAAACCATTACTACAACC | TGAaaccattactacaACC | 22 |
| 1113 | 1113_2 | CTATACCTAAAACAATCTA | CTatacctaaaacaaTCTA | 86 |
| 1119 | 1119_2 | CAAATATTCACAAATCCTA | CaaatattcacaaatCCTA | 78 |
| 1125 | 1125_2 | ACAATATATTCCTCAATCA | ACaatatattcctcaATCA | 74 |
| 1127 | 1127_2 | CATCCCTTTACCACTTT | CatccctttaccaCTTT | 97 |
| 1118 | 1118_2 | TAATATCCTCATTACCCATT | TaatatcctcattaccCATT | 97 |
| 1103 | 1103_2 | TCTATTCCTTAACCCAAC | TCtattccttaaccCAAC | 81 |
| 1122 | 1122_2 | AATCTTATTTACATCTTCC | AATCttatttacatcttCC | 11 |
| 1126 | 1126 2 | CCTGTAACAATTATACA | CCTGtaacaattataCA | 93 |
| 1122 | 1122_3 | AATCTTATTTACATCTTCC | AatcttatttacaTCtTCC | 54 |
| 1122 | 1122_4 | AATCTTATTTACATCTTCC | AAtcTtatttacAtCttCC | 17 |
| 1122 | 1122_5 | AATCTTATTTACATCTTCC | AAtcttatttacAtCttCC | 21 |
| 1122 | 1122_6 | AATCTTATTTACATCTTCC | AatctTatttacaTCttCC | 12 |
| 1122 | 1122_7 | AATCTTATTTACATCTTCC | AatcttatttacAtCttCC | 28 |
| 1122 | 1122_8 | AATCTTATTTACATCTTCC | AAtcttatttacAtcTTCC | 28 |
| 1122 | 1122_9 | AATCTTATTTACATCTTCC | AAtcTtatttacAtctTCC | 11 |
| 1122 | 1122_10 | AATCTTATTTACATCTTCC | AatctTatttacAtctTCC | 9 |
| 1122 | 1122_11 | AATCTTATTTACATCTTCC | AatcTtatttacatcTTCC | 10 |
| 1122 | 1122_12 | AATCTTATTTACATCTTCC | AATcTtatttacAtcTtCC | 10 |
| 1122 | 1122_13 | AATCTTATTTACATCTTCC | AatCTtatttacAtcttCC | 10 |
| 1122 | 1122_14 | AATCTTATTTACATCTTCC | AatCttatttacatctTCC | 7 |
| 1122 | 1122_15 | AATCTTATTTACATCTTCC | AatcttatttacaTCttCC | 32 |
| 1122 | 1122_16 | AATCTTATTTACATCTTCC | AatCttatttacatcTTCC | 4 |
| 1122 | 1122_17 | AATCTTATTTACATCTTCC | AAtCttatttacatcTtCC | 5 |
| 1122 | 1122_18 | AATCTTATTTACATCTTCC | AaTcTtatttacaTcTtCC | 9 |
| 1122 | 1122_19 | AATCTTATTTACATCTTCC | AatcTTatttacatcTtCC | 5 |
| 1122 | 1122_20 | AATCTTATTTACATCTTCC | AatcTtatttacatCttCC | 13 |
| 1122 | 1122_21 | AATCTTATTTACATCTTCC | AAtcttatttacatCttCC | 23 |
| 1122 | 1122_22 | AATCTTATTTACATCTTCC | AatctTatttacatCttCC | 8 |
| 1122 | 1122_23 | AATCTTATTTACATCTTCC | AatcTTatttacatCttCC | 4 |
| 1122 | 1122_24 | AATCTTATTTACATCTTCC | AatctTatttacatcTTCC | 8 |
| 1122 | 1122_25 | AATCTTATTTACATCTTCC | AATcTTatttacatcTtCC | 5 |
| 1122 | 1122_26 | AATCTTATTTACATCTTCC | AAtctTatttacatcTtCC | 12 |
| 1122 | 1122_27 | AATCTTATTTACATCTTCC | AaTCTtatttacatcTtCC | 3 |
| 1122 | 1122_28 | AATCTTATTTACATCTTCC | AaTcTTatttacatcTtCC | 3 |
| 1122 | 1122_29 | AATCTTATTTACATCTTCC | AatCTTatttacatcTtCC | 3 |
| 1122 | 1122_30 | AATCTTATTTACATCTTCC | AAtcTTatttacatctTCC | 5 |
| 1122 | 1122_31 | AATCTTATTTACATCTTCC | AAtcTtatttacatctTCC | 12 |
| 1122 | 1122_32 | AATCTTATTTACATCTTCC | AAtcttatttacatctTCC | 33 |
| 1122 | 1122_33 | AATCTTATTTACATCTTCC | AatCtTatttacatctTCC | 3 |
| 1122 | 1122_34 | AATCTTATTTACATCTTCC | AatcTTatttacatctTCC | 6 |
| 1122 | 1122_35 | AATCTTATTTACATCTTCC | AatcTtatttacatctTCC | 16 |
| 1122 | 1122_36 | AATCTTATTTACATCTTCC | AATCtTatttacatcttCC | 8 |
| 1122 | 1122_37 | AATCTTATTTACATCTTCC | AAtCTTatttacatcttCC | 5 |
| 1122 | 1122_38 | AATCTTATTTACATCTTCC | AAtCttatttacatcttCC | 16 |
| 1122 | 1122_39 | AATCTTATTTACATCTTCC | AaTCTtatttacatcttCC | 7 |
| 1122 | 1122_40 | AATCTTATTTACATCTTCC | AaTCtTatttacatcttCC | 5 |
| 1122 | 1122_41 | AATCTTATTTACATCTTCC | AatCTTatttacatcttCC | 5 |
| 1122 | 1122_42 | AATCTTATTTACATCTTCC | AatCTtatttacatcttCC | 13 |
| 1122 | 1122_43 | AATCTTATTTACATCTTCC | AatcTTatttacatcttCC | 17 |
| 1109 | 1109_3 | TGAAACCATTACTACAACC | TgaaaccattacTAcaaCC | 58 |
| 1109 | 1109_4 | TGAAACCATTACTACAACC | TgaaaccattacTAcAaCC | 20 |
| 1109 | 1109_5 | TGAAACCATTACTACAACC | TgaAAccattacTacAaCC | 23 |
| 1109 | 1109_6 | TGAAACCATTACTACAACC | TgAaAccattactAcaaCC | 50 |
| 1109 | 1109_7 | TGAAACCATTACTACAACC | TgAaaCcattactAcaaCC | 46 |
| 1109 | 1109_8 | TGAAACCATTACTACAACC | TgaAAccattacTacaaCC | 48 |
| 1109 | 1109_9 | TGAAACCATTACTACAACC | TgaaaccattactaCAaCC | 25 |
| 1109 | 1109_10 | TGAAACCATTACTACAACC | TgaaAccattacTaCaACC | 24 |
| 1109 | 1109_11 | TGAAACCATTACTACAACC | TGaaAccattactaCaaCC | 36 |
| 1109 | 1109_12 | TGAAACCATTACTACAACC | TgAAAccattactaCaaCC | 20 |
| 1109 | 1109_13 | TGAAACCATTACTACAACC | TgAAaCcattactaCaaCC | 26 |
| 1109 | 1109_14 | TGAAACCATTACTACAACC | TgAaaccattactaCaaCC | 27 |
| 1109 | 1109_15 | TGAAACCATTACTACAACC | TGaAaccattacTacAaCC | 14 |
| 1109 | 1109_16 | TGAAACCATTACTACAACC | TgAaaCcattactacAACC | 12 |
| 1109 | 1109_17 | TGAAACCATTACTACAACC | TgaaaCcattacTacAaCC | 36 |
| 1109 | 1109_18 | TGAAACCATTACTACAACC | TgaaaCcattacTacaaCC | 62 |
| 1109 | 1109_19 | TGAAACCATTACTACAACC | TGaaAccattactacaaCC | 47 |
| 1109 | 1109_20 | TGAAACCATTACTACAACC | TgaAaccattactaCAaCC | 19 |
| 1109 | 1109_21 | TGAAACCATTACTACAACC | TgaAaccattactACaACC | 16 |
| 1109 | 1109_22 | TGAAACCATTACTACAACC | TgAAaccattactACaACC | 9 |
| 1109 | 1109_23 | TGAAACCATTACTACAACC | TgAaAccattactAcaACC | 29 |
| 1109 | 1109_24 | TGAAACCATTACTACAACC | TgaaaCcattactAcaACC | 41 |
| 1109 | 1109_25 | TGAAACCATTACTACAACC | TgaAACcattactAcaaCC | 34 |
| 1109 | 1109_26 | TGAAACCATTACTACAACC | TgaAaCcattactaCaaCC | 28 |
| 1109 | 1109_27 | TGAAACCATTACTACAACC | TGaAaCcattactacAACC | 10 |
| 1109 | 1109_28 | TGAAACCATTACTACAACC | TgAAaCcattactAcAACC | 52 |
| 1109 | 1109_29 | TGAAACCATTACTACAACC | TGaAAccattactacaACC | 16 |
| 1109 | 1109_30 | TGAAACCATTACTACAACC | TGAaaccattactacaaCC | 36 |
| 1109 | 1109_31 | TGAAACCATTACTACAACC | TgaaaCcattactaCaACC | 21 |
| 1109 | 1109_32 | TGAAACCATTACTACAACC | TgAAAccattactacAACC | 9 |
| 1109 | 1109_33 | TGAAACCATTACTACAACC | TgAaaCcattactacAaCC | 14 |
| 1109 | 1109_34 | TGAAACCATTACTACAACC | TGaaaccattactacaACC | 43 |
| 1109 | 1109_35 | TGAAACCATTACTACAACC | TgAAaCcattactacaACC | 15 |
| 1109 | 1109_36 | TGAAACCATTACTACAACC | TgaAACcattactacaaCC | 15 |
| 1109 | 1109_37 | TGAAACCATTACTACAACC | TGaAaCcattactacaaCC | 16 |
| 1109 | 1109_38 | TGAAACCATTACTACAACC | TGaaaCcattactacaaCC | 38 |
| 1109 | 1109_39 | TGAAACCATTACTACAACC | TgAAACcattactacaaCC | 14 |
| 1109 | 1109_40 | TGAAACCATTACTACAACC | TgAAaCcattactacaaCC | 16 |
| 1109 | 1109_41 | TGAAACCATTACTACAACC | TgaAaCcattactacaaCC | 28 |
| 1109 | 1109_42 | TGAAACCATTACTACAACC | TgaaACcattactacaaCC | 28 |
| 1122 | 1122_44 | AATCTTATTTACATCTTCC | AatcttatttacaTCTtCC | 65 |
| 1122 | 1122_45 | AATCTTATTTACATCTTCC | AatcTtatttacAtCttCC | 38 |
| 1122 | 1122_46 | AATCTTATTTACATCTTCC | AatcTtatttacaTcTTCC | 34 |
| 1122 | 1122_47 | AATCTTATTTACATCTTCC | AAtCttatttacAtcTtCC | 10 |
| 1122 | 1122_48 | AATCTTATTTACATCTTCC | AAtcTtatttacATcTtCC | 35 |
| 1122 | 1122_49 | AATCTTATTTACATCTTCC | AatCttatttacAtcTtCC | 10 |
| 1122 | 1122_50 | AATCTTATTTACATCTTCC | AAtCttatttacAtcttCC | 11 |
| 1122 | 1122_51 | AATCTTATTTACATCTTCC | AAtctTatttacatCTtCC | 9 |
| 1122 | 1122_52 | AATCTTATTTACATCTTCC | AatcTTatttacAtcTtCC | 12 |
| 1122 | 1122_53 | AATCTTATTTACATCTTCC | AatctTatttacatCTtCC | 8 |
| 1122 | 1122_54 | AATCTTATTTACATCTTCC | AaTcTtatttacatcTTCC | 4 |
| 1122 | 1122_55 | AATCTTATTTACATCTTCC | AAtcttatttacAtcTtCC | 27 |
| 1122 | 1122_56 | AATCTTATTTACATCTTCC | AAtCtTatttacAtcttCC | 5 |
| 1122 | 1122_57 | AATCTTATTTACATCTTCC | AAtcTTatttacatcttCC | 14 |
| 1122 | 1122_58 | AATCTTATTTACATCTTCC | AaTCttatttacatcttCC | 13 |
| 1122 | 1122_59 | AATCTTATTTACATCTTCC | AATcttatttacatCttCC | 6 |
| 1122 | 1122_60 | AATCTTATTTACATCTTCC | AAtcTtatttacatCttCC | 10 |
| 1122 | 1122_61 | AATCTTATTTACATCTTCC | AAtcTTatttacatcTtCC | 6 |
| 1122 | 1122_62 | AATCTTATTTACATCTTCC | AatCtTatttacatcTtCC | 3 |
| 1122 | 1122_63 | AATCTTATTTACATCTTCC | AATCttatttacaTcttCC | 5 |
| 1122 | 1122_64 | AATCTTATTTACATCTTCC | AatCttatttacatcTtCC | 7 |
| 1122 | 1122_65 | AATCTTATTTACATCTTCC | AatCttatttacatcttCC | 32 |
| 1122 | 1122_66 | AATCTTATTTACATCTTCC | AatcttatttacatcTTCC | 19 |
| 1122 | 1122_67 | AATCTTATTTACATCTTCC | AATCttatttacatcTtCC | 3 |
| 1122 | 1122_68 | AATCTTATTTACATCTTCC | AATcTtatttacatcTtCC | 4 |
| 1122 | 1122_69 | AATCTTATTTACATCTTCC | AAtCTtatttacatcTtCC | 3 |
| 1122 | 1122_70 | AATCTTATTTACATCTTCC | AAtCtTatttacatcTtCC | 3 |
| 1122 | 1122_71 | AATCTTATTTACATCTTCC | AAtcTtatttacatcTtCC | 13 |
| 1122 | 1122_72 | AATCTTATTTACATCTTCC | AaTCttatttacatcTtCC | 5 |
| 1122 | 1122_73 | AATCTTATTTACATCTTCC | AatCTtatttacatcTtCC | 5 |
| 1122 | 1122_74 | AATCTTATTTACATCTTCC | AatctTatttacatcTtCC | 10 |
| 1122 | 1122_75 | AATCTTATTTACATCTTCC | AAtCTtatttacatctTCC | 3 |
| 1122 | 1122_76 | AATCTTATTTACATCTTCC | AAtCttatttacatctTCC | 5 |
| 1122 | 1122_77 | AATCTTATTTACATCTTCC | AaTCttatttacatctTCC | 5 |
| 1122 | 1122_78 | AATCTTATTTACATCTTCC | AatCTtatttacatctTCC | 4 |
| 1122 | 1122_79 | AATCTTATTTACATCTTCC | AAtCTtatttacatcttCC | 7 |
| 1122 | 1122_80 | AATCTTATTTACATCTTCC | AAtCtTatttacatcttCC | 5 |
| 1122 | 1122_81 | AATCTTATTTACATCTTCC | AatCtTatttacatcttCC | 8 |
| 1109 | 1109_43 | TGAAACCATTACTACAACC | TgAAaccattacTAcAaCC | 18 |
| 1109 | 1109_44 | TGAAACCATTACTACAACC | TgAaAccattacTacAaCC | 27 |
| 1109 | 1109_45 | TGAAACCATTACTACAACC | TgaAaCcattacTacAaCC | 65 |
| 1109 | 1109_46 | TGAAACCATTACTACAACC | TgAaaccattacTacaACC | 25 |
| 1109 | 1109_47 | TGAAACCATTACTACAACC | TgaAaccattacTacaACC | 35 |
| 1109 | 1109_48 | TGAAACCATTACTACAACC | TgaaAccattacTacaACC | 48 |
| 1109 | 1109_49 | TGAAACCATTACTACAACC | TgaAaCcattacTacaaCC | 44 |
| 1109 | 1109_50 | TGAAACCATTACTACAACC | TgaAaccattacTaCaaCC | 34 |
| 1109 | 1109_51 | TGAAACCATTACTACAACC | TGaaaccattacTacaACC | 29 |
| 1109 | 1109_52 | TGAAACCATTACTACAACC | TgAAaccattacTacaACC | 23 |
| 1109 | 1109_53 | TGAAACCATTACTACAACC | TgaaaCcattacTaCaaCC | 39 |
| 1109 | 1109_54 | TGAAACCATTACTACAACC | TGaaaccattactaCaaCC | 33 |
| 1109 | 1109_55 | TGAAACCATTACTACAACC | TgAaAccattactaCaaCC | 29 |
| 1109 | 1109_56 | TGAAACCATTACTACAACC | TGaaAccattactacAACC | 16 |
| 1109 | 1109_57 | TGAAACCATTACTACAACC | TGaaAccattactacAaCC | 18 |
| 1109 | 1109_58 | TGAAACCATTACTACAACC | TgAaACcattactacaaCC | 12 |
| 1109 | 1109_59 | TGAAACCATTACTACAACC | TgAaaccattactaCAaCC | 13 |
| 1109 | 1109_60 | TGAAACCATTACTACAACC | TgaaAccattactACaaCC | 36 |
| 1109 | 1109_61 | TGAAACCATTACTACAACC | TGaaaccattactAcaACC | 34 |
| 1109 | 1109_62 | TGAAACCATTACTACAACC | TgAaaCcattactACaaCC | 43 |
| 1109 | 1109_63 | TGAAACCATTACTACAACC | TGaAAccattactaCaaCC | 19 |
| 1109 | 1109_64 | TGAAACCATTACTACAACC | TGaaaCcattactACaaCC | 29 |
| 1109 | 1109_65 | TGAAACCATTACTACAACC | TGaAaccattactAcaaCC | 40 |
| 1109 | 1109_66 | TGAAACCATTACTACAACC | TgaAAccattactAcAACC | 14 |
| 1109 | 1109_67 | TGAAACCATTACTACAACC | TGaAaccattactAcAaCC | 14 |
| 1109 | 1109_68 | TGAAACCATTACTACAACC | TGaaaCcattactAcAaCC | 27 |
| 1109 | 1109_69 | TGAAACCATTACTACAACC | TgAaaCcattactAcAACC | 31 |
| 1109 | 1109_70 | TGAAACCATTACTACAACC | TgAaAccattactAcAaCC | 24 |
| 1109 | 1109_71 | TGAAACCATTACTACAACC | TgaaACcattactacAACC | 10 |
| 1109 | 1109_72 | TGAAACCATTACTACAACC | TGAaaccattactacAaCC | 11 |
| 1109 | 1109_73 | TGAAACCATTACTACAACC | TgaAACcattactAcAaCC | 34 |
| 1109 | 1109_74 | TGAAACCATTACTACAACC | TGaAaCcattactacaACC | 15 |
| 1109 | 1109_75 | TGAAACCATTACTACAACC | TGaaACcattactacaaCC | 14 |
| 1109 | 1109_76 | TGAAACCATTACTACAACC | TGaAaccattactaCaaCC | 22 |
| 1109 | 1109_77 | TGAAACCATTACTACAACC | TgaAAccattactaCaaCC | 30 |
| 1109 | 1109_78 | TGAAACCATTACTACAACC | TgaaAccattactaCaaCC | 50 |
| 1109 | 1109_79 | TGAAACCATTACTACAACC | TgaAACcattactacAaCC | 9 |
| 1109 | 1109_80 | TGAAACCATTACTACAACC | TGaAaccattactacaaCC | 31 |
| 1109 | 1109_81 | TGAAACCATTACTACAACC | TgAaaCcattactacaaCC | 31 |

In the oligonucleotide compound column, capital letters represent beta-D-oxy LNA nucleosides, LNA cytosines are 5-methyl cytosine, lower case letters are DNA nucleosides, and all internucleoside linkages are phosphorothioate.

### Example 5: Testing in vitro efficacy of LNA oligonucleotides in iCell® GlutaNeurons at 25 μM

### Materials and Methods:

[0418] An oligonucleotide screen was performed in a human cell line using selected LNA oligonucleotides from the previous examples.

[0419] The iCell® GlutaNeurons derived from human induced pluripotent stem cell were purchased from the vendor listed in Table 2, and were maintained as recommended by the supplier in a humidified incubator at 37° C. with 5% CO₂. For the screening assays, cells were seeded in 96 multi well plates in media recommended by the supplier (see Table 2 in the Materials and Methods section). The number of cells/well was optimized (Table 2).

[0420] Cells were grown for 7 days before addition of the oligonucleotide in concentration of 25 μM (dissolved in medium). 4 days after addition of the oligonucleotide, the cells were harvested.

[0421] RNA extraction and qPCR was performed as described for “Example 1”

[0422] Primer assays for ATXN3 and house keeping gene were:

ATXN3 primer assay (Assay ID: N/A, Item Name:
Hs.PT.58.39355049):
(SEQ ID NO: 1128)
Forward primer: GTTTCTAAAGACATGGTCACAGC
(SEQ ID NO: 1129)
Reverse: CTATCAGGACAGAGTTCACATCC
(SEQ ID NO: 1030)
Probe: 56-FAM/AAAGGCCAG/ZEN/CCACCAGTTCAGG/3IABkFQ/
TBP primer assay (Assay ID: N/A, Item name:
Hs.PT.58v.39858774
(SEQ ID NO: 1131)
Probe: 5′-/5HEX/TGA TCT TTG/ZEN/CAG TGA CCC
AGC ATC A/3IABkFQ/-3′
(SEQ ID NO: 1132)
Primer 1: 5′-GCT GTT TAA CTT CGC TTC CG-3′
(SEQ ID NO: 1133)
Primer 2: 5′-CAG CAA CTT CCT CAA TTC CTT G-3′

### Results:

[0423] The relative ATXN3 mRNA expression levels were determined as % of control (medium-treated cells) i.e. the lower the value the larger the inhibition.

[0424] The compounds tested and the target knock-down data is presented in Table 7.

### Example 6: Determination of EC50 values of LNA gapmers targeting ATXN3

### Materials and Methods:

[0425] Values for EC50 (concentration at which half effect on target knockdown is observed) was determined for the cell lines SK-N-AS, A431 and iPSCs (iCell® GlutaNeurons). The following oligoconcentrations were used:
[0426] SK-N-AS: 50 μM—half log dilution (3.16 fold)—8 steps including blank control
[0427] A431: 50 μM—half log dilution (3.16 fold)—8 steps including blank control
[0428] iPCS: 10 μM—10 fold dilution—8 steps including blank control

[0429] The cells were treated with oligo, lysed and analysed as indicated in previous examples.

### Results:

[0430] The compounds tested and their EC50 values is shown in table 7.

### Example 7: In vitro toxicity evaluation

### Materials and Methods:

[0431] The criterion for selection of oligonucleotides assessed in the various safety assays is based on the magnitude and frequency of signals obtained. Safety assays used were: Caspase activation, hepatotoxicity, nephrotoxicity toxicity and immunotoxicity assays. The signals obtained in the individual in vitro safety assays result in a score (0-safe, 0.5 borderline toxicity, 1-mild toxicity, 2-medium toxicity and 3-severe toxicity) and are summarized into a cumulative score for each sequence (See table 7), providing an objective ranking of compounds. As reported in the references provided, the signal strength is a measure of risk for in vivo toxicity based on validation of the assays using in vivo relevant reference molecules

[0432] In vitro toxicity assays were performed as described in the following references: Caspase activation assay: Dieckmann et al., Molecular Therapy: Nucleic Acids Vol. 10 Mar. 2018, pp 45-54.

[0433] Hepatotoxicity toxicity assay: Sewing et al., Methods in Molecular Biology Oligonucleotide-Based Therapies MIMB, volume 2036, pp 249-259 2019, Sewing et al., PLOS ONE DOI:10.1371/journal.pone.0159431 Jul. 21, 2016.

[0434] Nephrotoxicity toxicity assay: Moisan et al., Mol Ther Nucleic Acids. 2017 Mar. 17; 6:89-105. doi: 10.1016/j.omtn.2016.11.006. Epub 2016 Dec. 10.

[0435] Immunotoxicity: Sewing et al., PLoS One. 2017 Nov. 6;12(11):e0187574. doi: 10.1371/journal.pone.0187574. eCollection 2017.

[0436] As part of the screening cascade 1170 compounds were evaluated in the cell lines SK-N-AS and A431 where compound efficacy was evaluated (Tables 4-6). Of these, 50 of the most effective compounds were evaluated for caspase activation of which 18 underwent further evaluation in the descried in the three other in vitro tox assays (cumulative score is shown in Table 7).

### Results:

[0437] Conclusively, 8 compounds were identified as being highly effective and potent in vitro, and with a low or absent toxicity in the 4 in vitro assays these compounds were therefore selected for evaluated in transgenic mice expressing human ATNX3 pre-mRNA: Compounds #1856_1, 1813_1, 1812_1, 1809_2, 1607_1, 1122_62, 1122_67 and 1122_33.

TABLE 7
Data obtained from examples 5, 6 & 7

| | | | | | HiPCS, Maximal |
|---|---|---|---|---|---|
| | Total | SK-N-AS | A-431 | HiPSC | efficacy at 25 μM |
| | tox | EC50 | EC50 | EC50 | (% remaining |
| CMPID | score | (μM) | (μM) | (μM) | ATXN3 transcript) |
| 1856_1 | 1.5 | 0.53 | 0.22 | 0.23 | 2.87 |
| 1806_2 | 2 | 0.35 | 0.19 | 0.03 | 0.91 |
| 1888_1 | — | 0.72 | 0.54 | — | |
| 1813_1 | 2 | 0.24 | 0.08 | 0.04 | 1.85 |
| 1640_1 | — | 1.50 | 0.19 | — | |
| 1812_1 | 1.5 | 0.20 | 0.09 | 0.09 | 0.59 |
| 1117_2 | — | 0.73 | 0.57 | — | |
| 1810_1 | — | 0.36 | 0.14 | — | |
| 1809_2 | 1.25 | 0.22 | 0.09 | 0.05 | 1.44 |
| 1489_1 | — | 1.16 | 0.30 | — | |
| 1867_1 | — | 0.54 | 0.50 | — | |
| 1893_1 | — | 0.95 | 0.34 | 0.41 | 4 |
| 1906_1 | — | 0.36 | 0.57 | 0.04 | 2.55 |
| 1214_1 | — | 1.05 | 0.38 | — | |
| 1213_1 | — | 1.01 | 0.38 | — | |
| 1423_1 | — | 0.75 | 0.23 | 0.03 | 3.58 |
| 1790_1 | — | 0.42 | 0.47 | — | |
| 1605_1 | — | 0.47 | 0.17 | — | |
| 1607_1 | 2.5 | 0.32 | 0.25 | 0.08 | 4.46 |
| 1805_1 | — | 0.75 | 0.23 | — | |
| 1806_1 | — | 0.45 | 0.20 | 0.04 | 1.3 |
| 1809_1 | 3 | 0.24 | 0.20 | 0.02 | 1.81 |
| 1808_1 | 2 | 0.26 | 0.22 | 0.06 | 1.4 |
| 1625_1 | 0.5 | 0.94 | 0.25 | 0.66 | 7.16 |
| 1122_54 | — | 0.62 | 0.15 | — | |
| 1122_16 | — | 0.30 | 0.15 | — | |
| 1122_17 | — | 0.33 | 0.17 | 0.11 | 1.07 |
| 1122_62 | 0.5 | 0.21 | 0.10 | 0.03 | 3.53 |
| 1122_19 | — | 0.28 | 0.24 | — | |
| 1122_23 | — | 0.54 | 0.18 | 0.05 | 0.59 |
| 1122_67 | 0 | 0.29 | 0.10 | 0.01 | 0.52 |
| 1122_68 | — | 0.28 | 0.13 | 0.01 | |
| 1122_69 | — | 0.27 | 0.12 | — | |
| 1122_70 | — | 0.20 | 0.10 | — | |
| 1122_27 | 1 | 0.23 | 0.12 | 0.03 | 0.55 |
| 1122_72 | 0.5 | 0.25 | 0.15 | 0.06 | 2.28 |
| 1122_28 | 1 | 0.20 | 0.12 | 0.01 | 0.37 |
| 1122_29 | — | 0.19 | 0.09 | 0.02 | 1.6 |
| 1122_73 | — | 0.29 | 0.18 | 0.04 | 1.59 |
| 1122_75 | 1 | 0.44 | 0.12 | 0.03 | 2 |
| 1122_76 | — | 0.33 | 0.19 | — | |
| 1122_77 | 1 | 0.30 | 0.20 | 0.04 | 1.97 |
| 1122_78 | — | 0.29 | 0.18 | 0.02 | 1.91 |
| 1122_33 | 1.25 | 0.18 | 0.10 | 0.02 | 1.84 |
| 1122_37 | — | 0.25 | 0.13 | 0.03 | 0.89 |
| 1122_80 | — | 0.33 | 0.17 | — | |
| 1122_41 | — | 0.24 | 0.16 | 0.01 | 0.47 |
| 1109_22 | — | 0.90 | 0.23 | 0.11 | 8.41 |
| 1109_32 | 0 | 0.75 | 0.17 | 0.09 | 3.49 |
| 1109_79 | — | 1.48 | 0.20 | — | |

### Example 8: In vivo transgenic mouse study

### Materials and Methods:

[0438] Animal Care

[0439] In vivo activity and tolerability of the compounds were tested in 10-13 week old B6;CBA-Tg(ATXN3*)84.2Cce/IbezJ male and female mice (JAX®. W, Mice, The Jackson Laboratory) housed 3-5 per cage. The mice are transgenic mice which express the human ATXN3 pre-mRNA sequence, with 84 CAG repeats motif, an allele which is associated with MJD in humans). Animals were held in colony rooms maintained at constant temperature (22±2° C.) and humidity (40+80%) and illuminated for 12 hours per day (lights on at 0600 hours). All animals had ad libitum access to food and water throughout the studies. All procedures are performed in accordance with the respective Swiss regulations and approved by the Cantonal Ethical Committee for Animal Research.

[0440] Administration Route—Intra-cisterna magna injections.

[0441] The compounds were administered to mice by intra cisterna magna (ICM) injections. Prior to ICM injection the animals received 0.05 mg/kg Buprenorphine dosed sc as analgesia. For the ICM injection animals were placed in isofluran. Intracerebroventricular injections were performed using a Hamilton micro syringe with a FEP catheter fitted with a 36 gauge needle. The skin was incised, muscles retracted and the atlanto-occipital membrane exposed. Intracerebroventricular injections were performed using a Hamilton micro syringe with a catheter fitted with a 36 gauge needle. The 4 microliter bolus of test compound or vehicle was injected over 30 seconds. Muscles were repositioned and skin closed with 2-3 sutures. Animals were placed in a varm environment until they recovered from the procedure.

[0442] Two independent experiments were performed with groups of different compounds as shown in Table 8A.

TABLE 8A

| Compound ID | Dose, gg | Time-point | Group Size |
|---|---|---|---|
| Saline only | 0 | 4 wk | 6 |
| 1856_1 | 250 | 4 wk | 8 |
| 1813_1 | 250 | 4 wk | 8 |
| 1812_1 | 250 | 4 wk | 8 |
| 1809_2 | 250 | 4 wk | 8 |
| 1607_1 | 250 | 4 wk | 8 |
| 1122_62 | 250 | 4 wk | 8 |
| 1122_67 | 250 | 4 wk | 8 |
| 1122_33 | 250 | 4 wk | 8 |

[0443] Tolerability Results:

[0444] All compounds were found to be tolerated up to the 4 weeks timepoint. Acute toxicity was measured by monitoring the animal's behavior as described in WO2016/126995 (see example 9). Sub-acute toxicity was measured by monitoring the body weight of each animal during the time course of the experiment, with >5% weight reduction indicative of sub-acute toxicity. In some groups 1 or 2 animals did show some distress after the ICM administration and were euthanized, but this was likely to be due to the procedure rather than a adverse toxicity of any of the compounds. All eight compounds were therefore considered to be well tolerated in vivo.

[0445] 4 weeks post administration, the animals were sacrificed, and tissues from the cortex, midbrain, cerebellum, hippocampus pons/medulla and striatum were collected weighed and snap frozen in liquid N2 directly after sampling. Samples were stored on dry ice until storage at −80° C.

[0446] Analysis of in vivo samples. Description of tissue preparation for content measurement and qPCR.

[0447] Mouse tissue samples were homogenized in the MagNA Pure LC RNA Isolation Tissue Lysis Buffer (Roche, Indianapolis, Ind.) using a Qiagen TissueLyzer II. The homogenates were incubated for 30 minutes at room temperature for complete lysis. After lysis the homogenates were centrifuged for 3 minutes at 13000 rpm and the supernatant used for analysis. Half was set aside for bioanalysis and for the other half, RNA extraction was continued directly.

[0448] Oligo Content Analysis

[0449] For bioanalysis, the samples were diluted 10-50 fold for oligo content measurements with a hybridization ELISA method. A biotinylated LNA-capture probe and a digoxigenin-conjugated LNA-detection probe (both 35 nM in 5×SSCT, each complementary to one end of the LNA oligonucleotide to be detected) was mixed with the diluted homogenates or relevant standards, incubated for 30 minutes at RT and then added to a streptavidine-coated ELISA plates (Nunc cat. no. 436014).

[0450] The plates were incubated for 1 hour at RT, washed in 2×SSCT (300 mM sodium chloride, 30 mM sodium citrate and 0.05% v/v Tween-20, pH 7.0) The captured LNA duplexes were detected using an anti-DIG antibodies conjugated with alkaline phosphatase (Roche Applied Science cat. No. 11093274910) and an alkaline phosphatase substrate system (Blue Phos substrate, KPL product code 50-88-00). The amount of oligo complexes was measured as absorbance at 615 nm on a Biotek reader.

[0451] Data was normalized to the tissue weight and expressed as nM of oligo.

[0452] mRNA Analysis

[0453] RNA was purified from 350 μL of supernatant using the MagNA Pure 96 instrument using the kit Cellular RNA Large Volume Kit (Roche, Indianapolis, Ind.). RNA samples were normalized to 2 ng/μL in RNase-Free water and stored at −20° C. until further use.

[0454] For one-step qPCR (cDNA synthesis and qPCR), each sample was run in duplicates with four probe sets (IDT, Leuven, Belgium) run in duplex.

[0455] To each reaction 44 of previously diluted RNA, 0.54 of water and 5.54 of TaqMan MasterMix was added. Plates were centrifuged and heat-chocked at 90° C. for 40sek followed by a short incubation on ice before analyzing the samples using qPCR (Incubation at 50° C. for 15 minutes and 90° C. for 3 minutes followed by 40 cycles at 95° C. for 5 sec and 60° C. for 45 sec). Assay probes are described below.

[0456] Data was analyzed using the relative standard curve method where each is first normalized to the housekeeping gene (RPL4) and then expressed as percent of untreated control animals.

qPCR assays for in vivo studies:
Human ATXN3, qPR assay: (ATXN3_exon_8-9(1)
PrimeTime ® XL qPCR Assay (IDT).
qPCR probe and primers:
(SEQ ID NO: 1134)
Probe: 5′-/56-FAM/CTCCGCAGG/ZEN/GCT ATTCAGCT AAGT/
31ABkFQ/-3′
(SEQ ID NO: 1135)
Primer 1: 5′-AGT AAGATTTGT ACCTGATGTCTGT-3′
(SEQ ID NO: 1136)
Primer 2: 5′-CATGGAAGATGAGGAAGCAGAT-3′
House keeping gene used:
Mouse RPL4, qPCR assay (Mm.PT.58.17609218)
PrimeTime ® XL qPCR Assay (IDT).
qPCR probe and primers:
(SEQ ID NO: 1090)
Probe: 5′-/5HEX/CTG AAC AGC/ZEN/CTC CTT GGT CTT
CTT GTA/3IABkFQ/-3′
(SEQ ID NO: 1091)
Primer 1: 5′-CTT GCC AGC TCT CAT TCT CTG-3′
(SEQ ID NO: 1092)
Primer 2: 5′- TGG TGG TTG AAG ATA AGG TTG A-3′

### Results:

[0457] The results are shown in Table 8B.

[0458] All compounds tested gave efficacious target inhibition in the tissues tested and were tolerated at the doses tested. Compound 1122_33 across the compounds tested has either the best or second ranked highest specific activity (lower EC50) in all tissues, followed by 1122_62 and 1122_67.

[0459] Compounds 1122_67, 1607_1, 1813_1 and 1122_33 provided high efficacy in vivo in all tissues tested, illustrating a remarkable consistent inhibition of ATXN3 expression across the brain tissues tested. Based on an accumulative rank score compound 1122_67 was consistently either the best or second ranked compound in terms of efficacy of ATXN3 knock down in the tissues tested.

### Example 9: Testing in vitro efficacy of LNA oligonucleotides and Reference Compounds in a time course, dose range experiment in human iPSC-derived neurons

### Materials and Methods:

[0460] Compounds used: 1122_67 and 1813_1 & the following reference compounds disclosed in WO2019/217708, as referenced by the Compound ID numbers used in WO2019/217708: 1100673, 1101657, 1102130, 1103014 & 1102987. Compounds 1100673, 1101657, 1102130 are highlighted in WO2019/217708 as providing potent in vivo inhibition, compounds 1103014 and 1102987 were not evaluated in vivo in WO2019/217708, but are included as reference compounds due to the sequence similarity to compound 1122_67 (1103014) and 1813_1 (1102987).

[0461] The iCell® GlutaNeurons cells were prepared and maintained as described in Example 5 & Table 2. Cells were grown for 7 days before addition of the oligonucleotide in concentration of 0-10 μM (dissolved in medium).

[0462] Cells were harvested at 4 days, 6 days, 9 days, 12 days and 20 days after oligo treatment, and RNA extraction and qPCR was performed as described for “Example 1”, using the ATXN3 primar assay described in example 5. The relative ATXN3 mRNA expression levels were determined as % of control (medium-treated cells) i.e. the lower the value the larger the inhibition.

### Results:

[0463] The results are shown in Table 9.

TABLE 9

| | EC50 in hiPSC-derived neurons, nM | | | | |
|---|---|---|---|---|---|
| Compound | Day 4 | Day 6 | Day 9 | Day 12 | Day20 |
| 1122_67 | 7.2 | 1.3 | 1.4 | 1.1 | 1.1 |
| 1813_1 | 23 | 6.3 | 10 | 8.9 | 7.7 |
| 1100673 | 110 | 27 | 30 | 34 | 44 |
| 1101657 | 515 | 204 | 69 | 90 | 73 |
| 1102130 | 315 | 164 | 390 | 101 | 133 |
| 1103014 | 662 | 64 | 435 | 98 | 369 |
| 1102987 | 944 | 305 | 135 | 391 | 200 |

Compounds 1122_67 and 1813_1 were remarkably more potent than the 5 reference compounds, with compound 1122_67 being the most potent compound at all time points and both 1122_67 and 1813_1 gave a remarkably effective and long lasting inhibition of ATXN3 mRNA.

### Example 10: Comparative In vivo transgenic mouse study

### Materials and Methods:

[0464] A further in vivo study was performed at Charles River Laboratories Den Bosch B.V., Groningen, NL, using compound 1122_67 and 1813_1, and reference compound 1100673 (WO2019/217708). The study used male and female B6;CBA-Tg(ATXN3*)84.2Cce/IbezJ mice with the compounds administered via intracisternal (ICM) administration. At two timepoints after compound administration, 1 or 4 weeks, animals were euthanized and terminal plasma samples and tissues were collected.

[0465] Animal Care

[0466] In vivo activity and tolerability of the compounds were tested in 62 B6;CBA-Tg(ATXN3*)84.2Cce/IbezJ male and female mice (JAX® Mice, The Jackson Laboratory) at the age between 7-10 weeks. Following arrival, animals were housed in groups up to 5 in individually vented cages (IVC, 40×20×16 cm) in a temperature (22±2° C.) and humidity (55±15%) controlled environment on a 12 hour light cycle (07.00-19.00 h). Males and females were kept in separate cages. Standard diet (SDS Diets, RM1 PL) and domestic quality mains water were available ad libitum. If required, animals received soaked chow and/or Royal Canin in addition to Standard diet as part of pamper care. The experiments were conducted in strict accordance with the Guide for the Care and Use of Laboratory Animals (National Research Council 2011) and were in accordance with European Union directive 2010/63 and the Dutch law. The in vivo experiment described was performed at Charles River Laboratories Den Bosch B.V. location Groningen (Groningen, the Netherlands).

[0467] Administration Route-Intra-cisterna Magna injections.

[0468] The compounds were administered to mice by intra cisterna magna (ICM) injections. Mice were anesthetized using isoflurane (2.5-3% and 500 mL/min 02). Before surgery, Finadyne (1 mg/kg, s.c.) was administered for analgesia during surgery and the post-surgical recovery period. A mixture of bupivacaine and epinephrine was applied to the incision site and periost of the skull for local analgesia.

[0469] Animals were placed in a stereotaxic frame (Kopf instruments, USA) and an incision made at the back of the head towards the neck. Then, the skin was spread and the coordinates marked prior to drilling a hole in the occipital bone of the skull, where a cannula was placed. Next, the compounds were injected into the cisterna magna (ICM). A volume of 4 μL of the assigned test item was injected over 30 seconds. After injection, the needle and cannula were held in place for 30 seconds to ensure no back flow occurred. The cannula was then retracted, the hole was covered with skin and the incision was closed by sutures.

[0470] Animals were placed in a warm environment until recovered from the procedure.

[0471] Compound 1122_67 was administered at a single dose of 90, 150 or 250 μg, and compound 1813_1 was administered at a single dose of 150 μg or 250 μg. The reference compound 1100673 was administered at a single dose of 250 μg only.

[0472] From three days prior to ICM injections, up to one week after administration, animal's weight was registered daily. Animal's weight was monitored and registered at least twice a week for the rest of the experiment.

[0473] At the end of the experiment, on day 8 or 29 (1 or 4 weeks), the animals were euthanized by Euthasol® overdose. Terminal plasma was collected in Li-Hep tubes. Terminal tissues were harvested from the animals and were dissected on a chilled surface. Half of the tissue samples were stored in 2.0 mL Safe-Lock tubes, PCR clean, pre-weighted and precooled. Immediately after collection, samples were weighed and flash frozen in liquid N2 prior to storage at −80° C. The other half was fixed in 4% PFA for 72 hours and subsequently transferred to 70% ethanol awaiting shipment. Tissue dissection and collection was performed, collecting tissue from a range of tissues: Midbrain, Cortex, Striatum, Hippocampus, Cerebellum, Brainstem, and spinal cord (Cervical, Thoracic & Lumbar).

[0474] Tolerability Results:

[0475] Acute toxicity was measured by monitoring the animal's behavior as described in WO2016/126995 (see example 9). Chronic toxicity was measured by monitoring the body weight of each animal during the time course of the experiment, with >5% weight reduction indicative of chronic toxicity. In some groups 1 or 2 animals did show some distress after the ICM administration and were euthanized, but this was likely to be due to the nature of the surgical procedure rather than a adverse toxicity of any of the compounds.

[0476] There were signs of acute toxicity at the 250 μg dose of 1813_1 in 3 mice, leading to early euthanisation of this group of animals. Otherwise all compounds were found to be tolerated up to the 4 weeks timepoint.

[0477] After 4 weeks the animals were euthanised and brain and CNS tissue collected: Spinal cord, cortex, striatum, hippocampus, midbrain, brainstem and cerebellum as well as liver and kidney was collected in liquid nitrogen for drug concentration analysis an ATAXN3 mRNA analysis at 1 or 4 weeks following dosing.

[0478] Analysis of in vivo samples: Description of tissue preparation for content measurement and qPCR was performed as per Example 8. The EC50 was calculated, and maximum KD achieved recorded this data is provided in Table 10.

### Results:

[0479] Compound 1122_67 was the most effective compound in all brain tissues tested and gave an excellent effective knock-down in all brain tissues tested, indicating good bio-distribution to all key tissues (1813_1 was as effective as 1122_67 in spinal cord, brainstem and midbrain). Notably compound 1122_67 gave highly effective knock-down in cerebellum, a tissue which the reference compound 1100673 was notably less effective. A further key observation at the after 4 weeks of treatment is that the efficacy of 1122_67 was even further improved as compared to the 1 week timepoint in all brain tissues. Notably, the efficacy of the reference compound, 1100673 was notably lower at the 4 week stage vs. the 1 week timepoint, particularly in key cerebellum and cortex tissues. The long duration of action and high potency of 1122_67 indicates that this compound should require a less frequent administration in a therapeutic setting.

### Example 11: Compound Stability to SVPD

### Materials and Methods:

[0480] 3′—exonuclease snake venom phosphodiesterase I (SVP) (Art. No. LS003926, Lot. No. 58H18367) was purchased by Worthington Biochemical Corp. (Lakewood, N.Y., USA). The reaction mix for the 3′—exonuclease snake venom phosphodiesterase I (SVP) assay consisted of 50 mM TRIS/HCl pH 8 buffer, 10 mM MgCl2, 30 U CIP (NEB, Ipswich, Mass., USA), 0.02 U SVP and the oligonucleotide compound. The stability of the ASOs against SVPD was determined by performing the nuclease assays over a one day time course. In each reaction mix an amount about 0.2 mg/mL ASO in a totaly volume of 150 μl was used.

[0481] The incubation period of 24 h at 37° C. was performed on an autosampler, the SVPD and reactions and the ASO stabilities were monitored in time intervals by an UHPLC system equipped with a diode-array detector and coupled with electrospray ionization-time of flight mass spectrometry (ESI-ToF-MS). To generate the t=0 h time point, the enzyme was added into the reaction mix, directly before the first injection. Further injections took place at regular intervals over a period of 24 hours.

[0482] Compounds tested, 1122_67, 1813_1 and the reference compounds 1100673, 1101657, 1102130, 1103014, and 1102987.

### Results:

[0483] The data is illustrated in FIG. 9. Whilst the three highlighted reference compounds from WO2019/217708 and the 1122_67 and 1813_1 compounds had good stability in the SVPD assay, the 2 reference compounds from WO2019/217708 with the closest sequence to 1122_67 and 1813_1, compounds 1103014 and 1102987 were notably more vulnerable to SVPD degradation as compared to 1122_67 and 1813_1.

### Example 12: WT and polyQ Ataxin 3 protein levels in human SCA3 patient derived fibroblasts treated with selected oligonucleotides (ASO)

### Materials and Methods:

[0484] This experiment was performed to investigate the efficacy of effiacty of knock down of the LNA oligonucleotides, 1122_67 and 1122_33, as compared to the prior art compounds, 1100673 and 1102130 in SCA3 patient derived fibroblasts, allowing for an assessment of the efficacy on the disease causing ataxin3 allele and the ataxin3 WT allele.

[0485] Cell line used for the ASO treatment, human SCA3 patient derived fibroblasts (GM06153 Coriell Institute). One hundred thousand cells were seeded per well in a 24 well plate with a total volume of 1 ml. ASOs were added immediately after to a final concentration of 10 μM (gymnotic uptake). After 4 days of incubation at, cells were washed twice with PBS, and harvested in 200 μl RIPA buffer (Thermo Scientific, Pierce).

[0486] Western blots were performed on the capillary-based immunoassay platform (WES, ProteinSimple) using a WES 12-230 kDa Wes Separation Module. Cell lysate were diluted 10×in Sample load buffer (ProteinSimple) prior loading on the cartridge. Primary antibody for Ataxin 3 (rabbit monoclonal antibody, prod. #702788 from Invitrogen) and for HPRT (rabbit monoclonal antibody, cat. #Ab109021 from Abcam). Both antibodies were used in 1/100 dilutions. Goat anti-rabbit HRP conjugate (Part. #DM-001, ProteinSimple) was used as secondary antibody.

[0487] Compass software (ProteinSimple) was for quantification of the protein bands.

### Results:

[0488] To show an efficient KD of both the wild type as well as the polyQ extended Ataxin 3 protein, GM06153 cells were treated with 10 uM of ASO for four days prior to protein analysis on the WES. Ataxin 3 antibody recognize both isoforms, and the intensity (area under peak) was normalized to the protein input based on the signal from HPRT. As seen from the FIGS. 10A and B, we observe that upon treatment with 1122_67 and 1122_33, there is an increased reduction in the polyQ extended Ataxin 3 compared to the wild type Ataxin 3. This trend is not observed for the other ASOs (Scrambled control, 1100673 or 1102130) where we observe a higher amount of the polyQ extended Ataxin 3, compared to the wild type Ataxin 3. A higher activity on the disease causing polyQ extended Ataxin 3 than the WT Ataxin 3 is preferable as it allows a selective reduction of the disease causing allele.

### Example 13: Redesign library

### Materials and Methods:

[0489] Compound ID Nos. 1122_67 and 1122_33 were used as parents in a redesign library. The compounds in the redesign library differed from the parent compounds and each other in intemucleoside linkages and/or the nucleosides used. In general, nucleosides at specific positions were varied between LNA, DNA and nucleoside analogs with different modifications in the 2′ position in the ribose. The intemucleoside linkages were otherwise phosphorothioate linkages. In some compounds, the chirality was controlled by use of phosphorothioate linkages providing for sterodefined backbones. The modifications employed are illustrated below.

[chemical structure]

[0490] The compounds of the redesign library are listed in Table 11, where the structure of each compound is described by the hierarchical editing language for macromolecules (HELM) (for details, see Zhang et al., Chem. Inf. Model. 2012, 52, 10, 2796-2806) using the following HELM annotation keys:
[0491] [LR](G) is a beta-D-oxy-LNA guanine nucleoside,
[0492] [LR](T) is a beta-D-oxy-LNA thymine nucleoside,
[0493] [LR](A) is a beta-D-oxy-LNA adenine nucleoside,
[0494] [LR]([5meC] is a beta-D-oxy-LNA 5-methyl cytosine nucleoside,
[0495] [dR](G) is a DNA guanine nucleoside,
[0496] [dR](T) is a DNA thymine nucleoside,
[0497] [dR](A) is a DNA adenine nucleoside,
[0498] [dR]([C] is a DNA cytosine nucleoside,
[0499] [sP] is a phosphorothioate internucleoside linkage (stereo undefined)
[0500] [ssP] is a stereodefined Sp phosphorothioate internucleoside linkage
[0501] [mR](G) is a 2′-O-methyl guanine nucleoside,
[0502] [mR](U) is a 2′-O-methyl uracil nucleoside,
[0503] [mR](A) is a 2′-O-methyl adenine nucleoside,
[0504] [mR](C) is a 2′-O-methyl cytosine nucleoside,
[0505] [MOE](G) is a 2′-O-methoxyethyl guanine nucleoside,
[0506] [MOE](T) is a 2′-O-methoxyethyl thymine nucleoside,
[0507] [MOE](A) is a 2′-O-methoxyethyl adenine nucleoside,
[0508] [MOE]([5meC]) is a 2′-O-methoxyethyl 5-methyl cytosine nucleoside,
[0509] [fR](G) is a 2′-fluoro guanine nucleoside,
[0510] [fR](U) is a 2′-fluoro uracil nucleoside,
[0511] [fR](A) is a 2′-fluoro adenine nucleoside,
[0512] [fR](C) is a 2′-fluoro cytosine nucleoside.

### Results:

[0513] In Table 11, a compound with a compound ID number “1122_” or “1816_” is a modified version of SEQ ID NO:1122 or SEQ ID NO:1816, respectively.

TABLE 11
Compound and HELM table

| CMPIDNO | HELM |
|---|---|
| 1122_82 | [LR](A)[sP]•[dR](A)[sP]•[dR](T)[sP]•[LR]([5meC])[sP]•[dR](T)[sP]•[LR](T)[sP]• |
| | [dR](A)[sP]•[dR](T)[sP]•[dR](T)[sP]•[dR](T)[sP]•[dR](A)[sP]•[MOE]([5meC])[sP]• |
| | [dR](A)[sP]•[dR](T)[sP]•[dR](C)[sP]•[dR](T)[sP]•[LR](T)[sP]•[LR]([5meC])[sP]• |
| | [LR]([5meC]) |
| 1122_83 | [LR](A)[sP]•[dR](A)[sP]•[dR](T)[sP]•[LR]([5meC])[sP]•[dR](T)[sP]•[LR](T)[sP]• |
| | [dR](A)[sP]•[dR](T)[sP]•[dR](T)[sP]•[dR](T)[sP]•[dR](A)[sP]•[dR](C)[sP]• |
| | [dR](A)[sP]•[dR](T)[sP]•[dR](C)[sP]•[dR](T)[sP]•[mR](U)[sP]•[LR]([5meC])[sP]• |
| | [LR]([5meC]) |
| 1122_84 | [LR](A)[sP]•[dR](A)[sP]•[dR](T)[sP]•[LR]([5meC])[sP]•[dR](T)[sP]•[LR](T)[sP]• |
| | [dR](A)[sP]•[dR](T)[sP]•[dR](T)[sP]•[dR](T)[sP]•[dR](A)[sP]•[dR](C)[sP]• |
| | [dR](A)[sP]•[dR](T)[sP]•[dR](C)[sP]•[mR](U)[sP]•[LR](T)[sP]•[LR]([5meC])[sP]• |
| | [LR]([5meC]) |
| 1122_85 | [LR](A)[sP]•[dR](A)[sP]•[dR](T)[sP]•[LR]([5meC])[sP]•[dR](T)[sP]•[LR](T)[sP]• |
| | [dR](A)[sP]•[dR](T)[sP]•[dR](T)[sP]•[dR](T)[sP]•[dR](A)[sP]•[dR](C)[sP]• |
| | [dR](A)[sP]•[mR](U)[sP]•[dR](C)[sP]•[dR](T)[sP]•[LR](T)[sP]•[LR]([5meC])[sP]• |
| | [LR]([5meC]) |
| 1122_86 | [LR](A)[sP]•[dR](A)[sP]•[dR](T)[sP]•[LR]([5meC])[sP]•[dR](T)[sP]•[mR](U)[sP]• |
| | [dR](A)[sP]•[dR](T)[sP]•[dR](T)[sP]•[dR](T)[sP]•[dR](A)[sP]•[dR](C)[sP]• |
| | [dR](A)[sP]•[dR](T)[sP]•[dR](C)[sP]•[dR](T)[sP]•[LR](T)[sP]•[LR]([5meC])[sP]• |
| | [LR]([5meC]) |
| 1122_87 | [LR](A)[sP]•[dR](A)[sP]•[dR](T)[sP]•[LR]([5meC])[sP]•[mR](U)[sP]•[LR](T)[sP]• |
| | [dR](A)[sP]•[dR](T)[sP]•[dR](T)[sP]•[dR](T)[sP]•[dR](A)[sP]•[dR](C)[sP]• |
| | [dR](A)[sP]•[dR](T)[sP]•[dR](C)[sP]• [dR](T)[sP]•[LR](T)[sP]•[LR]([5meC])[sP]• |
| | [LR]([5meC]) |
| 1122_88 | [LR](A)[sP]•[dR](A)[sP]•[mR](U)[sP]•[LR]([5meC])[sP]•[dR](T)[sP]•[LR](T)[sP]• |
| | [dR](A)[sP]•[dR](T)[sP]•[dR](T)[sP]•[dR](T)[sP]•[dR](A)[sP]•[dR](C)[sP]• |
| | [dR](A)[sP]•[dR](T)[sP]•[dR](C)[sP]• [dR](T)[sP]•[LR](T)[sP]•[LR]([5meC])[sP]• |
| | [LR]([5meC]) |
| 1122_89 | [LR](A)[sP]•[dR](A)[sP]•[dR](T)[sP]•[LR]([5meC])[sP]•[dR](T)[sP]•[LR](T)[sP]• |
| | [dR](A)[sP]•[mR](U)[sP]•[dR](T)[sP]•[dR](T)[sP]•[dR](A)[sP]•[dR](C)[sP]• |
| | [dR](A)[sP]•[dR](T)[sP]•[dR](C)[sP]•[dR](T)[sP]•[LR](T)[sP]•[LR]([5meC])[sP]• |
| | [LR]([5meC]) |
| 1122_90 | [LR](A)[sP]•[dR](A)[sP]•[dR](T)[sP]•[LR]([5meC])[sP]•[dR](T)[sP]•[LR](T)[sP]• |
| | [dR](A)[sP]•[dR](T)[sP]•[mR](U)[sP]•[dR](T)[sP]•[dR](A)[sP]•[dR](C)[sP]• |
| | [dR](A)[sP]•[dR](T)[sP]•[dR](C)[sP]•[dR](T)[sP]•[LR](T)[sP]•[LR]([5meC])[sP]• |
| | [LR]([5meC]) |
| 1122_91 | [LR](A)[sP]•[dR](A)[sP]•[dR](T)[sP]•[LR]([5meC])[sP]•[dR](T)[sP]•[LR](T)[sP]• |
| | [dR](A)[sP]•[dR](T)[sP]•[dR](T)[sP]•[mR](U)[sP]•[dR](A)[sP]•[dR](C)[sP]• |
| | [dR](A)[sP]•[dR](T)[sP]•[dR](C)[sP]•[dR](T)[sP]•[LR](T)[sP]•[LR]([5meC])[sP]• |
| | [LR]([5meC]) |
| 1122_92 | [LR](A)[sP]•[dR](A)[sP]•[dR](T)[sP]•[LR]([5meC])[sP]•[dR](T)[sP]•[LR](T)[sP]• |
| | [dR](A)[sP]•[dR](T)[sP]•[dR](T)[sP]•[dR](T)[sP]•[dR](A)[sP]•[dR](C)[sP]• |
| | [dR](A)[sP]•[dR](T)[sP]•[MOE]([5meC])[sP]•[dR](T)[sP]•[LR](T)[sP]• |
| | [LR]([5meC])[sP]•[LR]([5meC]) |
| 1122_93 | [MOE](A)[sP]•[MOE](A)[sP]•[MOE](T)[sP]•[MOE]([5meC])[sP]•[MOE](T)[sP]• |
| | [MOE](T)[sP]•[MOE](A)[sP]•[dR](T)[sP]•[dR](T)[sP]•[dR](T)[sP]•[dR](A)[sP]• |
| | [dR](C)[sP]•[dR](A)[sP]•[dR](T)[sP]•[MOE]([5meC])[sP]•[MOE](T)[sP]•[MOE](T)[sP]• |
| | [MOE]([5meC])[sP]•[MOE]([5meC]) |
| 1122_94 | [MOE](A)[sP]•[MOE](A)P•[MOE](T)P•[MOE]([5meC])P•[MOE](T)P•[MOE](T)P•[MOE](A)[sP]• |
| | [dR](T)[sP]•[dR](T)[sP]•[dR](T)[sP]•[dR](A)[sP]•[dR](C)[sP]•[dR](A)[sP]• |
| | [dR](T)[sP]•[MOE]([5meC])P•[MOE](T)P•[MOE](T)[sP]•[MOE]([5meC])[sP]•[MOE]([5meC]) |
| 1122_95 | [LR](A)[sP]•[mR](A)[sP]•[mR](U)[sP]•[LR]([5meC])[sP]•[dR](T)[sP]•[LR](T)[sP]• |
| | [dR](A)[sP]•[dR](T)[sP]•[dR](T)[sP]•[dR](T)[sP]•[dR](A)[sP]•[dR](C)[sP]• |
| | [dR](A)[sP]•[dR](T)[sP]•[dR](C)[sP]•[LR](T)[sP]•[dR](T)[sP]•[LR]([5meC])[sP]• |
| | [LR]([5meC]) |
| 1122_96 | [LR](A)[sP]•[LR](A)[sP]•[LR](T)[sP]•[LR]([5meC])[sP]•[dR](T)[sP]•[dR](T)[sP]• |
| | [dR](A)[sP]•[dR](T)[sP]•[dR](T)[sP]•[dR](T)[sP]•[dR](A)[sP]•[dR](C)[sP]• |
| | [dR](A)[sP]•[dR](T)[sP]•[LR]([5meC])[sP]•[LR](T)[sP]•[dR](T)[sP]• |
| | [LR]([5meC])[sP]•[LR]([5meC]) |
| 1122_97 | [LR](A)[sP]•[LR](A)[sP]•[LR](T)[sP]•[LR]([5meC])[sP]•[dR](T)[sP]•[dR](T)[sP]• |
| | [dR](A)[sP]•[dR](T)[sP]•[dR](T)[sP]•[dR](T)[sP]•[dR](A)[sP]•[LR]([5meC])[sP]• |
| | [dR](A)[sP]•[dR](T)[sP]•[dR](C)[sP]•[LR](T)[sP]•[dR](T)[sP]•[LR]([5meC])[sP]• |
| | [LR]([5meC]) |
| 1122_98 | [LR](A)[sP]•[LR](A)[sP]•[LR](T)[sP]•[LR]([5meC])[sP]•[dR](T)[sP]•[dR](T)[sP]• |
| | [dR](A)[sP]•[dR](T)[sP]•[dR](T)[sP]•[dR](T)[sP]•[dR](A)[sP]•[dR](C)[sP]• |
| | [dR](A)[sP]•[dR](T)[sP]•[MOE]([5meC])[sP]•[LR](T)[sP]•[dR](T)[sP]•[LR]([5meC])[sP]• |
| | [LR]([5meC]) |
| 1122_99 | [LR](A)[sP]•[LR](A)[sP]•[LR](T)[sP]•[LR]([5meC])[sP]•[dR](T)[sP]•[dR](T)[sP]• |
| | [dR](A)[sP]•[dR](T)[sP]•[dR](T)[sP]•[dR](T)[sP]•[dR](A)[sP]•[MOE]([5meC])[sP]• |
| | [dR](A)[sP]•[dR](T)[sP]•[dR](C)[sP]•[LR](T)[sP]•[dR](T)[sP]•[LR]([5meC])[sP]• |
| | [LR]([5meC]) |
| 1122_100 | [LR](A)[sP]•[LR](A)[sP]•[LR](T)[sP]•[LR]([5meC])[sP]•[dR](T)[sP]•[dR](T)[sP]• |
| | [dR](A)[sP]•[dR](T)[sP]•[dR](T)[sP]•[dR](T)[sP]•[dR](A)[sP]•[dR](C)[sP]• |
| | [dR](A)[sP]•[dR](T)[sP]•[dR](C)[sP]•[LR](T)[sP]•[mR](U)[sP]•[LR]([5meC])[sP]• |
| | [LR]([5meC]) |
| 1122_101 | [LR](A)[sP]•[LR](A)[sP]•[LR](T)[sP]•[LR]([5meC])[sP]•[dR](T)[sP]•[dR](T)[sP]• |
| | [dR](A)[sP]•[dR](T)[sP]•[dR](T)[sP]•[dR](T)[sP]•[dR](A)[sP]•[dR](C)[sP]• |
| | [dR](A)[sP]•[dR](T)[sP]•[dR](C)[sP]•[mR](U)[sP]•[dR](T)[sP]•[LR]([5meC])[sP]• |
| | [LR]([5meC]) |
| 1122_102 | [LR](A)[sP]•[LR](A)[sP]•[LR](T)[sP]•[LR]([5meC])[sP]•[dR](T)[sP]•[dR](T)[sP]• |
| | [dR](A)[sP]•[dR](T)[sP]•[dR](T)[sP]•[dR](T)[sP]•[dR](A)[sP]•[dR](C)[sP]• |
| | [dR](A)[sP]•[mR](U)[sP]•[dR](C)[sP]•[LR](T)[sP]•[dR](T)[sP]•[LR]([5meC])[sP]• |
| | [LR]([5meC]) |
| 1122_103 | [LR](A)[sP]•[LR](A)[sP]•[LR](T)[sP]•[LR]([5meC])[sP]•[dR](T)[sP]•[dR](T)[sP]• |
| | [dR](A)[sP]•[dR](T)[sP]•[dR](T)[sP]•[mR](U)[sP]•[dR](A)[sP]•[dR](C)[sP]• |
| | [dR](A)[sP]•[dR](T)[sP]•[dR](C)[sP]•[LR](T)[sP]•[dR](T)[sP]•[LR]([5meC])[sP]• |
| | [LR]([5meC]) |
| 1122_104 | [LR](A)[sP]•[LR](A)[sP]•[LR](T)[sP]•[LR]([5meC])[sP]•[dR](T)[sP]•[dR](T)[sP]• |
| | [dR](A)[sP]•[dR](T)[sP]•[mR](U)[sP]•[dR](T)[sP]•[dR](A)[sP]•[dR](C)[sP]• |
| | [dR](A)[sP]•[dR](T)[sP]•[dR](C)[sP]•[LR](T)[sP]•[dR](T)[sP]•[LR]([5meC])[sP]• |
| | [LR]([5meC]) |
| 1122_105 | [LR](A)[sP]•[LR](A)[sP]•[LR](T)[sP]•[LR]([5meC])[sP]•[dR](T)[sP]•[dR](T)[sP]• |
| | [dR](A)[sP]•[mR](U)[sP]•[dR](T)[sP]•[dR](T)[sP]•[dR](A)[sP]•[dR](C)[sP]• |
| | [dR](A)[sP]•[dR](T)[sP]•[dR](C)[sP]•[LR](T)[sP]•[dR](T)[sP]•[LR]([5meC])[sP]• |
| | [LR]([5meC]) |
| 1122_106 | [LR](A)[sP]•[LR](A)[sP]•[LR](T)[sP]•[LR]([5meC])[sP]•[mR](U)[sP]•[dR](T)[sP]• |
| | [dR](A)[sP]•[dR](T)[sP]•[dR](T)[sP]•[dR](T)[sP]•[dR](A)[sP]•[dR](C)[sP]• |
| | [dR](A)[sP]•[dR](T)[sP]•[dR](C)[sP]•[LR](T)[sP]•[dR](T)[sP]•[LR]([5meC])[sP]• |
| | [LR]([5meC]) |
| 1122_107 | [LR](A)[sP]•[LR](A)[sP]•[mR](U)[sP]•[LR]([5meC])[sP]•[dR](T)[sP]•[dR](T)[sP]• |
| | [dR](A)[sP]•[dR](T)[sP]•[dR](T)[sP]•[dR](T)[sP]•[dR](A)[sP]•[dR](C)[sP]• |
| | [dR](A)[sP]•[dR](T)[sP]•[dR](C)[sP]•[LR](T)[sP]•[dR](T)[sP]•[LR]([5meC])[sP]• |
| | [LR]([5meC]) |
| 1122_108 | [LR](A)[sP]•[mR](A)[sP]•[mR](U)[sP]•[LR]([5meC])[sP]•[dR](T)[sP]•[LR](T)[sP]• |
| | [dR](A)[sP]•[dR](T)[sP]•[dR](T)[sP]•[dR](T)[sP]•[dR](A)[sP]•[dR](C)[sP]• |
| | [dR](A)[sP]•[dR](T)[sP]•[dR](C)[sP]•[dR](T)[sP]•[LR](T)[sP]•[LR]([5meC])[sP]• |
| | [LR]([5meC]) |
| 1122_109 | [LR](A)[sP]•[LR](A)[sP]•[LR](T)[sP]•[LR]([5meC])[sP]•[dR](T)[sP]•[mR](U)[sP]• |
| | [dR](A)[sP]•[dR](T)[sP]•[dR](T)[sP]•[dR](T)[sP]•[dR](A)[sP]•[dR](C)[sP]• |
| | [dR](A)[sP]•[dR](T)[sP]•[dR](C)[sP]•[LR](T)[sP]•[dR](T)[sP]•[LR]([5meC])[sP]• |
| | [LR]([5meC]) |
| 1122_110 | [LR](A)[sP]•[LR](A)[sP]•[dR](T)[sP]•[LR]([5meC])[sP]•[dR](T)[sP]•[dR](T)[sP]• |
| | [LR](A)[sP]•[dR](T)[sP]•[dR](T)[sP]•[dR](T)[sP]•[dR](A)[sP]•[dR](C)[sP]• |
| | [dR](A)[sP]•[dR](T)[sP]•[LR]([5meC])[sP]•[LR](T)[sP]•[dR](T)[sP]• |
| | [LR]([5meC])[sP][LR]([5meC]) |
| 1122_111 | [LR](A)[sP]•[LR](A)[sP]•[dR](T)[sP]•[LR]([5meC])[sP]•[dR](T)[sP]•[dR](T)[sP]• |
| | [LR](A)[sP]•[dR](T)[sP]•[dR](T)[sP]•[dR](T)[sP]•[dR](A)[sP]•[LR]([5meC])[sP]• |
| | [dR](A)[sP]•[dR](T)[sP]•[dR](C)[sP]•[LR](T)[sP]•[dR](T)[sP]•[LR]([5meC])[sP]• |
| | [LR]([5meC]) |
| 1122_112 | [LR](A)[sP]•[LR](A)[sP]•[dR](T)[sP]•[LR]([5meC])[sP]•[dR](T)[sP]•[dR](T)[sP]• |
| | [LR](A)[sP]•[dR](T)[sP]•[dR](T)[sP]•[dR](T)[sP]•[dR](A)[sP]•[dR](C)[sP]• |
| | [dR](A)[sP]•[dR](T)[sP]•[MOE[LR]([5meC]) |
| 1122_113 | [LR](A)[sP]•[LR](A)[sP]•[dR](T)[sP]•[LR]([5meC])[sP]•[dR](T)[sP]•[dR](T)[sP]• |
| | [LR](A)[sP]•[dR](T)[sP]•[dR](T)[sP]•[dR](T)[sP]•[dR](A)[sP]•[MOE]([5meC])[sP]• |
| | [dR](A)[sP]•[dR](T)[sP]•[dR](C)[sP]•[LR](T)[sP]•[dR](T)[sP]•[LR]([5meC])[sP]• |
| | [LR]([5meC]) |
| 1122_114 | [LR](A)[sP]•[LR](A)[sP]•[dR](T)[sP]•[LR]([5meC])[sP]•[dR](T)[sP]•[dR](T)[sP]• |
| | [LR](A)[sP]•[dR](T)[sP]•[dR](T)[sP]•[dR](T)[sP]•[dR](A)[sP]•[dR](C)[sP]• |
| | [dR](A)[sP]•[dR](T)[sP]•[dR](C)[sP]•[LR](T)[sP]•[mR](U)[sP]•[LR]([5meC])[sP]• |
| | [LR]([5meC]) |
| 1122_115 | [LR](A)[sP]•[LR](A)[sP]•[dR](T)[sP]•[LR]([5meC])[sP]•[dR](T)[sP]•[dR](T)[sP]• |
| | [LR](A)[sP]•[dR](T)[sP]•[dR](T)[sP]•[dR](T)[sP]•[dR](A)[sP]•[dR](C)[sP]• |
| | [dR](A)[sP]•[dR](T)[sP]•[dR](C)[sP]•[mR](U)[sP]•[dR](T)[sP]•[LR]([5meC])[sP]• |
| | [LR]([5meC]) |
| 1122_116 | [LR](A)[sP]•[LR](A)[sP]•[dR](T)[sP]•[LR]([5meC])[sP]•[dR](T)[sP]•[dR](T)[sP]• |
| | [LR](A)[sP]•[dR](T)[sP]•[dR](T)[sP]•[dR](T)[sP]•[dR](A)[sP]•[dR](C)[sP]• |
| | [dR](A)[sP]•[mR](U)[sP]•[dR](C)[sP]•[LR](T)[sP]•[dR](T)[sP]•[LR]([5meC])[sP]• |
| | [LR]([5meC]) |
| 1122_117 | [LR](A)[sP]•[LR](A)[sP]•[dR](T)[sP]•[LR]([5meC])[sP]•[dR](T)[sP]•[dR](T)[sP]• |
| | [LR](A)[sP]•[dR](T)[sP]•[dR](T)[sP]•[mR](U)[sP]•[dR](A)[sP]•[dR](C)[sP]• |
| | [dR](A)[sP]•[dR](T)[sP]•[dR](C)[sP]•[LR](T)[sP]•[dR](T)[sP]•[LR]([5meC])[sP]• |
| | [LR]([5meC]) |
| 1122_118 | [LR](A)[sP]•[LR](A)[sP]•[dR](T)[sP]•[LR]([5meC])[sP]•[dR](T)[sP]•[dR](T)[sP]• |
| | [LR](A)[sP]•[dR](T)[sP]•[mR](U)[sP]•[dR](T)[sP]•[dR](A)[sP]•[dR](C)[sP]• |
| | [dR](A)[sP]•[dR](T)[sP]•[dR](C)[sP]•[LR](T)[sP]•[dR](T)[sP]•[LR]([5meC])[sP]• |
| | [LR]([5meC]) |
| 1122_119 | [LR](A)[sP]•[LR](A)[sP]•[dR](T)[sP]•[LR]([5meC])[sP]•[dR](T)[sP]•[dR](T)[sP]• |
| | [LR](A)[sP]•[mR](U)[sP]•[dR](T)[sP]•[dR](T)[sP]•[dR](A)[sP]•[dR](C)[sP]• |
| | [dR](A)[sP]•[dR](T)[sP]•[dR](C)[sP]•[LR](T)[sP]•[dR](T)[sP]•[LR]([5meC])[sP]• |
| | [LR]([5meC]) |
| 1122_120 | [LR](A)[sP]•[LR](A)[sP]•[dR](T)[sP]•[LR]([5meC])[sP]•[dR](T)[sP]•[mR](U)[sP]• |
| | [LR](A)[sP]•[dR](T)[sP]•[dR](T)[sP]•[dR](T)[sP]•[dR](A)[sP]•[dR](C)[sP]• |
| | [dR](A)[sP]•[dR](T)[sP]•[dR](C)[sP]•[LR](T)[sP]•[dR](T)[sP]•[LR]([5meC])[sP]• |
| | [LR]([5meC]) |
| 1122_121 | [LR](A)[sP]•[LR](A)[sP]•[dR](T)[sP]•[LR]([5meC])[sP]•[mR](U)[sP]•[dR](T)[sP]• |
| | [LR](A)[sP]•[dR](T)[sP]•[dR](T)[sP]•[dR](T)[sP]•[dR](A)[sP]•[dR](C)[sP]• |
| | [dR](A)[sP]•[dR](T)[sP]•[dR](C)[sP]•[LR](T)[sP]•[dR](T)[sP]•[LR]([5meC])[sP]• |
| | [LR]([5meC]) |
| 1122_122 | [LR](A)[sP]•[LR](A)[sP]•[mR](U)[sP]•[LR]([5meC])[sP]•[dR](T)[sP]•[dR](T)[sP]• |
| | [LR](A)[sP]•[dR](T)[sP]•[dR](T)[sP]•[dR](T)[sP]•[dR](A)[sP]•[dR](C)[sP]• |
| | [dR](A)[sP]•[dR](T)[sP]•[dR](C)[sP]•[LR](T)[sP]•[dR](T)[sP]•[LR]([5meC])[sP]• |
| | [LR]([5meC]) |
| 1122_123 | [LR](A)[sP]•[dR](A)[sP]•[dR](T)[sP]•[LR]([5meC])[sP]•[dR](T)[sP]•[LR](T)[sP]• |
| | [dR](A)[sP]•[dR](T)[sP]•[dR](T)[sP]•[dR](T)[sP]•[dR](A)[sP]•[dR](C)[sP]• |
| | [dR](A)[sP]•[dR](T)[sP]•[LR]([5meC])[sP]•[dR](T)[sP]•[LR](T)[sP]•[LR]([5meC])[sP]• |
| | [LR]([5meC]) |
| 1122_124 | [LR](A)[sP]•[dR](A)[sP]•[dR](T)[sP]•[LR]([5meC])[sP]•[dR](T)[sP]•[LR](T)[sP]• |
| | [dR](A)[sP]•[dR](T)[sP]•[dR](T)[sP]•[dR](T)[sP]•[dR](A)[sP]•[LR]([5meC])[sP]• |
| | [dR](A)[sP]•[dR](T)[sP]•[dR](C)[sP]•[dR](T)[sP]•[LR](T)[sP]•[LR]([5meC])[sP]• |
| | [LR]([5meC]) |
| 1122_125 | [LR](A)[sP]•[LR](A)[sP]•[dR](T)[sP]•[LR]([5meC])[sP]•[dR](T)[sP]•[dR](T)[sP]• |
| | [LR](A)[sP]•[dR](T)[sP]•[dR](T)[sP]•[dR](T)[sP]•[dR](A)[sP]•[dR](C)[sP]• |
| | [dR](A)[sP]•[dR](T)[sP]•[dR](C)[sP]•[LR](T)[sP]•[dR](T)[sP]•[LR]([5meC])[sP]• |
| | [LR]([5meC]) |
| 1122_126 | [LR](A)[sP]•[LR](A)[sP]•[dR](T)[sP]•[LR]([5meC])[sP]•[dR](T)[sP]•[dR](T)[sP]• |
| | [LR](A)[ssP]•[dR](T)[sP]•[dR](T)[sP]•[dR](T)[sP]•[dR](A)[sP]•[dR](C)[sP]• |
| | [dR](A)[sP]•[dR](T)[sP]•[dR](C)[sP]•[LR](T)[sP]•[dR](T)[sP]•[LR]([5meC])[sP]• |
| | [LR]([5meC]) |
| 1122_127 | [LR](A)[sP]•[LR](A)[sP]•[dR](T)[sP]•[LR]([5meC])[sP]•[dR](T)[sP]•[dR](T)[sP]• |
| | [LR](A)[sP]•[dR](T)[ssP]•[dR](T)[sP]•[dR](T)[sP]•[dR](A)[sP]•[dR](C)[sP]• |
| | [dR](A)[sP]•[dR](T)[sP]•[dR](C)[sP]•[LR](T)[sP]•[dR](T)[sP]•[LR]([5meC])[sP]• |
| | [LR]([5meC]) |
| 1122_128 | [LR](A)[sP]•[LR](A)[sP]•[dR](T)[sP]•[LR]([5meC])[sP]•[dR](T)[sP]•[dR](T)[sP]• |
| | [LR](A)[sP]•[dR](T)[sP]•[dR](T)[ssP]•[dR](T)[sP]•[dR](A)[sP]•[dR](C)[sP]• |
| | [dR](A)[sP]•[dR](T)[sP]•[dR](C)[sP]•[LR](T)[sP]•[dR](T)[sP]•[LR]([5meC])[sP]• |
| | [LR]([5meC]) |
| 1122_129 | [LR](A)[sP]•[LR](A)[sP]•[dR](T)[sP]•[LR]([5meC])[sP]•[dR](T)[sP]•[dR](T)[sP]• |
| | [LR](A)[sP]•[dR](T)[sP]•[dR](T)[sP]•[dR](T)[ssP]•[dR](A)[sP]•[dR](C)[sP]• |
| | [dR](A)[sP]•[dR](T)[sP]•[dR](C)[sP]•[LR](T)[sP]•[dR](T)[sP]•[LR]([5meC])[sP]• |
| | [LR]([5meC]) |
| 1122_130 | [LR](A)[sP]•[LR](A)[sP]•[dR](T)[sP]•[LR]([5meC])[sP]•[dR](T)[sP]•[dR](T)[sP]• |
| | [LR](A)[sP]•[dR](T)[sP]•[dR](T)[sP]•[dR](T)[sP]•[dR](A)[ssP]•[dR](C)[sP]• |
| | [dR](A)[sP]•[dR](T)[sP]•[dR](C)[sP]•[LR](T)[sP]•[dR](T)[sP]•[LR]([5meC])[sP]• |
| | [LR]([5meC]) |
| 1122_131 | [LR](A)[sP]•[LR](A)[sP]•[dR](T)[sP]•[LR]([5meC])[sP]•[dR](T)[sP]•[dR](T)[sP]• |
| | [LR](A)[sP]•[dR](T)[sP]•[dR](T)[sP]•[dR](T)[sP]•[dR](A)[sP]•[dR](C)[ssP]• |
| | [dR](A)[sP]•[dR](T)[sP]•[dR](C)[sP]•[LR](T)[sP]•[dR](T)[sP]•[LR]([5meC])[sP]• |
| | [LR]([5meC]) |
| 1122_132 | [LR](A)[sP]•[LR](A)[sP]•[dR](T)[sP]•[LR]([5meC])[sP]•[dR](T)[sP]•[dR](T)[sP]• |
| | [LR](A)[sP]•[dR](T)[sP]•[dR](T)[sP]•[dR](T)[sP]•[dR](A)[sP]•[dR](C)[sP]• |
| | [dR](A)[ssP]•[dR](T)[sP]•[dR](C)[sP]•[LR](T)[sP]•[dR](T)[sP]•[LR]([5meC])[sP]• |
| | [LR]([5meC]) |
| 1122_133 | [LR](A)[sP]•[LR](A)[sP]•[dR](T)[sP]•[LR]([5meC])[sP]•[dR](T)[sP]•[dR](T)[sP]• |
| | [LR](A)[sP]•[dR](T)[sP]•[dR](T)[sP]•[dR](T)[sP]•[dR](A)[sP]•[dR](C)[sP]• |
| | [dR](A)[sP]•[dR](T)[ssP]•[dR](C)[sP]•[LR](T)[sP]•[dR](T)[sP]•[LR]([5meC])[sP]• |
| | [LR]([5meC]) |
| 1122_134 | [LR](A)[sP]•[LR](A)[sP]•[dR](T)[sP]•[LR]([5meC])[sP]•[dR](T)[sP]•[dR](T)[sP]• |
| | [LR](A)[sP]•[dR](T)[sP]•[dR](T)[sP]•[dR](T)[sP]•[dR](A)[sP]•[dR](C)[sP]• |
| | [dR](A)[sP]•[dR](T)[sP]•[dR](C)[ssP]•[LR](T)[sP]•[dR](T)[sP]•[LR]([5meC])[sP]• |
| | [LR]([5meC]) |
| 1122_135 | [LR](A)[sP]•[LR](A)[sP]•[dR](T)[sP]•[LR]([5meC])[sP]•[dR](T)[sP]•[dR](T)[sP]• |
| | [LR](A)[sP]•[dR](T)[sP]•[dR](T)[sP]•[dR](T)[sP]•[dR](A)[sP]•[dR](C)[sP]• |
| | [dR](A)[sP]•[dR](T)[sP]•[dR](C)[sP]•[LR](T)[ssP]•[dR](T)[sP]•[LR]([5meC])[sP]• |
| | [LR]([5meC]) |
| 1122_136 | [LR](A)[sP]•[LR](A)[sP]•[LR](T)[sP]•[LR]([5meC])[ssP]•[dR](T)[sP]•[dR](T)[sP]• |
| | [dR](A)[sP]•[dR](T)[sP]•[dR](T)[sP]•[dR](T)[sP]•[dR](A)[sP]•[dR](C)[sP]• |
| | [dR](A)[sP]•[dR](T)[sP]•[dR](C)[sP]•[LR](T)[sP]•[dR](T)[sP]•[LR]([5meC])[sP]• |
| | [LR]([5meC]) |
| 1122_137 | [LR](A)[sP]•[LR](A)[sP]•[LR](T)[sP]•[LR]([5meC])[sP]•[dR](T)[ssP]•[dR](T)[sP]• |
| | [dR](A)[sP]•[dR](T)[sP]•[dR](T)[sP]•[dR](T)[sP]•[dR](A)[sP]•[dR](C)[sP]• |
| | [dR](A)[sP]•[dR](T)[sP]•[dR](C)[sP]•[LR](T)[sP]•[dR](T)[sP]•[LR]([5meC])[sP]• |
| | [LR]([5meC]) |
| 1122_138 | [LR](A)[sP]•[LR](A)[sP]•[LR](T)[sP]•[LR]([5meC])[sP]•[dR](T)[sP]•[dR](T)[ssP]• |
| | [dR](A)[sP]•[dR](T)[sP]•[dR](T)[sP]•[dR](T)[sP]•[dR](A)[sP]•[dR](C)[sP]• |
| | [dR](A)[sP]•[dR](T)[sP]•[dR](C)[sP]•[LR](T)[sP]•[dR](T)[sP]•[LR]([5meC])[sP]• |
| | [LR]([5meC]) |
| 1122_139 | [LR](A)[sP]•[LR](A)[sP]•[LR](T)[sP]•[LR]([5meC])[sP]•[dR](T)[sP]•[dR](T)[sP]• |
| | [dR](A)[ssP]•[dR](T)[sP]•[dR](T)[sP]•[dR](T)[sP]•[dR](A)[sP]•[dR](C)[sP]• |
| | [dR](A)[sP]•[dR](T)[sP]•[dR](C)[sP]•[LR](T)[sP]•[dR](T)[sP]•[LR]([5meC])[sP]• |
| | [LR]([5meC]) |
| 1122_140 | [LR](A)[sP]•[LR](A)[sP]•[LR](T)[sP]•[LR]([5meC])[sP]•[dR](T)[sP]•[dR](T)[sP]• |
| | [dR](A)[sP]•[dR](T)[ssP]•[dR](T)[sP]•[dR](T)[sP]•[dR](A)[sP]•[dR](C)[sP]• |
| | [dR](A)[sP]•[dR](T)[sP]•[dR](C)[sP]•[LR](T)[sP]•[dR](T)[sP]•[LR]([5meC])[sP]• |
| | [LR]([5meC]) |
| 1122_141 | [LR](A)[sP]•[LR](A)[sP]•[LR](T)[sP]•[LR]([5meC])[sP]•[dR](T)[sP]•[dR](T)[sP]• |
| | [dR](A)[sP]•[dR](T)[sP]•[dR](T)[ssP]•[dR](T)[sP]•[dR](A)[sP]•[dR](C)[sP]• |
| | [dR](A)[sP]•[dR](T)[sP]•[dR](C)[sP]•[LR](T)[sP]•[dR](T)[sP]•[LR]([5meC])[sP]• |
| | [LR]([5meC]) |
| 1122_142 | [LR](A)[sP]•[LR](A)[sP]•[LR](T)[sP]•[LR]([5meC])[sP]•[dR](T)[sP]•[dR](T)[sP]• |
| | [dR](A)[sP]•[dR](T)[sP]•[dR](T)[sP]•[dR](T)[ssP]•[dR](A)[sP]•[dR](C)[sP]• |
| | [dR](A)[sP]•[dR](T)[sP]•[dR](C)[sP]•[LR](T)[sP]•[dR](T)[sP]•[LR]([5meC])[sP]• |
| | [LR]([5meC]) |
| 1122_143 | [LR](A)[sP]•[LR](A)[sP]•[LR](T)[sP]•[LR]([5meC])[sP]•[dR](T)[sP]•[dR](T)[sP]• |
| | [dR](A)[sP]•[dR](T)[sP]•[dR](T)[sP]•[dR](T)[sP]•[dR](A)[ssP]•[dR](C)[sP]• |
| | [dR](A)[sP]•[dR](T)[sP]•[dR](C)[sP]•[LR](T)[sP]•[dR](T)[sP]•[LR]([5meC])[sP]• |
| | [LR]([5meC]) |
| 1122_144 | [LR](A)[sP]•[LR](A)[sP]•[LR](T)[sP]•[LR]([5meC])[sP]•[dR](T)[sP]•[dR](T)[sP]• |
| | [dR](A)[sP]•[dR](T)[sP]•[dR](T)[sP]•[dR](T)[sP]•[dR](A)[sP]•[dR](C)[ssP]• |
| | [dR](A)[sP]•[dR](T)[sP]•[dR](C)[sP]•[LR](T)[sP]•[dR](T)[sP]•[LR]([5meC])[sP]• |
| | [LR]([5meC]) |
| 1122_145 | [LR](A)[sP]•[LR](A)[sP]•[LR](T)[sP]•[LR]([5meC])[sP]•[dR](T)[sP]•[dR](T)[sP]• |
| | [dR](A)[sP]•[dR](T)[sP]•[dR](T)[sP]•[dR](T)[sP]•[dR](A)[sP]•[dR](C)[sP]• |
| | [dR](A)[ssP]•[dR](T)[sP]•[dR](C)[sP]•[LR](T)[sP]•[dR](T)[sP]•[LR]([5meC])[sP]• |
| | [LR]([5meC]) |
| 1122_146 | [LR](A)[sP]•[LR](A)[sP]•[LR](T)[sP]•[LR]([5meC])[sP]•[dR](T)[sP]•[dR](T)[sP]• |
| | [dR](A)[sP]•[dR](T)[sP]•[dR](T)[sP]•[dR](T)[sP]•[dR](A)[sP]•[dR](C)[sP]• |
| | [dR](A)[sP]•[dR](T)[ssP]•[dR](C)[sP]•[LR](T)[sP]•[dR](T)[sP]•[LR]([5meC])[sP]• |
| | [LR]([5meC]) |
| 1122_147 | [LR](A)[sP]•[LR](A)[sP]•[LR](T)[sP]•[LR]([5meC])[sP]•[dR](T)[sP]•[dR](T)[sP]• |
| | [dR](A)[sP]•[dR](T)[sP]•[dR](T)[sP]•[dR](T)[sP]•[dR](A)[sP]•[dR](C)[sP]• |
| | [dR](A)[sP]•[dR](T)[sP]•[dR](C)[ssP]•[LR](T)[sP]•[dR](T)[sP]•[LR]([5meC])[sP]• |
| | [LR]([5meC]) |
| 1122_148 | [LR](A)[sP]•[LR](A)[sP]•[LR](T)[sP]•[LR]([5meC])[sP]•[dR](T)[sP]•[dR](T)[sP]• |
| | [dR](A)[sP]•[dR](T)[sP]•[dR](T)[sP]•[dR](T)[sP]•[dR](A)[sP]•[dR](C)[sP]• |
| | [dR](A)[sP]•[dR](T)[sP]•[dR](C)[sP]•[LR](T)[ssP]•[dR](T)[sP]•[LR]([5meC])[sP]• |
| | [LR]([5meC]) |
| 1122_149 | [LR](A)[sP]•[dR](A)[sP]•[dR](T)[sP]•[LR]([5meC])[sP]•[dR](T)[sP]•[LR](T)[ssP]• |
| | [dR](A)[sP]•[dR](T)[sP]•[dR](T)[sP]•[dR](T)[sP]•[dR](A)[sP]•[dR](C)[sP]• |
| | [dR](A)[sP]•[dR](T)[sP]•[dR](C)[sP]•[dR](T)[sP]•[LR](T)[sP]•[LR]([5meC])[sP]• |
| | [LR]([5meC]) |
| 1122_150 | [LR](A)[sP]•[dR](A)[sP]•[dR](T)[sP]•[LR]([5meC])[sP]•[dR](T)[sP]•[LR](T)[sP]• |
| | [dR](A)[ssP]•[dR](T)[sP]•[dR](T)[sP]•[dR](T)[sP]•[dR](A)[sP]•[dR](C)[sP]• |
| | [dR](A)[sP]•[dR](T)[sP]•[dR](C)[sP]•[dR](T)[sP]•[LR](T)[sP]•[LR]([5meC])[sP]• |
| | [LR]([5meC]) |
| 1122_151 | [LR](A)[sP]•[dR](A)[sP]•[dR](T)[sP]•[LR]([5meC])[sP]•[dR](T)[sP]•[LR](T)[sP]• |
| | [dR](A)[sP]•[dR](T)[ssP]•[dR](T)[sP]•[dR](T)[sP]•[dR](A)[sP]•[dR](C)[sP]• |
| | [dR](A)[sP]•[dR](T)[sP]•[dR](C)[sP]•[dR](T)[sP]•[LR](T)[sP]•[LR]([5meC])[sP]• |
| | [LR]([5meC]) |
| 1122_152 | [LR](A)[sP]•[dR](A)[sP]•[dR](T)[sP]•[LR]([5meC])[sP]•[dR](T)[sP]•[LR](T)[sP]• |
| | [dR](A)[sP]•[dR](T)[sP]•[dR](T)[ssP]•[dR](T)[sP]•[dR](A)[sP]•[dR](C)[sP]• |
| | [dR](A)[sP]•[dR](T)[sP]•[dR](C)[sP]•[dR](T)[sP]•[LR](T)[sP]•[LR]([5meC])[sP]• |
| | [LR]([5meC]) |
| 1122_153 | [LR](A)[sP]•[dR](A)[sP]•[dR](T)[sP]•[LR]([5meC])[sP]•[dR](T)[sP]•[LR](T)[sP]• |
| | [dR](A)[sP]•[dR](T)[sP]•[dR](T)[sP]•[dR](T)[ssP]•[dR](A)[sP]•[dR](C)[sP]• |
| | [dR](A)[sP]•[dR](T)[sP]•[dR](C)[sP]•[dR](T)[sP]•[LR](T)[sP]•[LR]([5meC])[sP]• |
| | [LR]([5meC]) |
| 1122_154 | [LR](A)[sP]•[dR](A)[sP]•[dR](T)[sP]•[LR]([5meC])[sP]•[dR](T)[sP]•[LR](T)[sP]• |
| | [dR](A)[sP]•[dR](T)[sP]•[dR](T)[sP]•[dR](T)[sP]•[dR](A)[ssP]•[dR](C)[sP]• |
| | [dR](A)[sP]•[dR](T)[sP]•[dR](C)[sP]•[dR](T)[sP]•[LR](T)[sP]•[LR]([5meC])[sP]• |
| | [LR]([5meC]) |
| 1122_155 | [LR](A)[sP]•[dR](A)[sP]•[dR](T)[sP]•[LR]([5meC])[sP]•[dR](T)[sP]•[LR](T)[sP]• |
| | [dR](A)[sP]•[dR](T)[sP]•[dR](T)[sP]•[dR](T)[sP]•[dR](A)[sP]•[dR](C)[ssP]• |
| | [dR](A)[sP]•[dR](T)[sP]•[dR](C)[sP]•[dR](T)[sP]•[LR](T)[sP]•[LR]([5meC])[sP]• |
| | [LR]([5meC]) |
| 1122_156 | [LR](A)[sP]•[dR](A)[sP]•[dR](T)[sP]•[LR]([5meC])[sP]•[dR](T)[sP]•[LR](T)[sP]• |
| | [dR](A)[sP]•[dR](T)[sP]•[dR](T)[sP]•[dR](T)[sP]•[dR](A)[sP]•[dR](C)[sP]• |
| | [dR](A)[ssP]•[dR](T)[sP]•[dR](C)[sP]•[dR](T)[sP]•[LR](T)[sP]•[LR]([5meC])[sP]• |
| | [LR]([5meC]) |
| 1122_157 | [LR](A)[sP]•[dR](A)[sP]•[dR](T)[sP]•[LR]([5meC])[sP]•[dR](T)[sP]•[LR](T)[ sP]• |
| | [dR](A)[sP]•[dR](T)[sP]•[dR](T)[sP]•[dR](T)[sP]•[dR](A)[sP]•[dR](C)[sP]• |
| | [dR](A)[sP]•[dR](T)[ssP]•[dR](C)[sP]•[dR](T)[sP]•[LR](T)[sP]•[LR]([5meC])[sP]• |
| | [LR]([5meC]) |
| 1122_158 | [LR](A)[sP]•[dR](A)[sP]•[dR](T)[sP]•[LR]([5meC])[sP]•[dR](T)[sP]•[LR](T)[sP]• |
| | [dR](A)[sP]•[dR](T)[sP]•[dR](T)[sP]•[dR](T)[sP]•[dR](A)[sP]•[dR](C)[sP]• |
| | [dR](A)[sP]•[dR](T)[sP]•[dR](C)[ssP]•[dR](T)[sP]•[LR](T)[sP]•[LR]([5meC])[sP]• |
| | [LR]([5meC]) |
| 1122_159 | [LR](A)[sP]•[dR](A)[sP]•[dR](T)[sP]•[LR]([5meC])[sP]•[dR](T)[sP]•[LR](T)[sP]• |
| | [dR](A)[sP]•[dR](T)[sP]•[dR](T)[sP]•[dR](T)[sP]•[dR](A)[sP]•[dR](C)[sP]• |
| | [dR](A)[sP]•[dR](T)[sP]•[dR](C)[sP]•[dR](T)[ssP]•[LR](T)[sP]•[LR]([5meC])[sP]• |
| | [LR]([5meC]) |
| 1122_160 | [LR](A)[sP]•[dR](A)[sP]•[dR](T)[sP]•[LR]([5meC])[sP]•[dR](T)[sP]•[LR](T)[sP]• |
| | [dR](A)[sP]•[dR](T)[sP]•[dR](T)[sP]•[dR](T)[sP]•[dR](A)[sP]•[dR](C)[sP]• |
| | [dR](A)[sP]•[dR](T)[sP]•[dR](C)[sP]•[dR](T)[sP]•[LR](T)[ssP]•[LR]([5meC])[sP]• |
| | [LR]([5meC]) |
| 1122_161 | [LR](A)[sP]•[dR](A)[sP]•[dR](T)[sP]•[LR]([5meC])[sP]•[dR](T)[sP]•[LR](T)[sP]• |
| | [dR](A)[sP]•[dR](T)[sP]•[dR](T)[sP]•[dR](T)[sP]•[dR](A)[sP]•[dR](C)[sP]• |
| | [dR](A)[sP]•[MOE](T)[sP]•[dR](C)[sP]•[dR](T)[sP]•[LR](T)[sP]•[LR]([5meC])[sP]• |
| | [LR]([5meC]) |
| 1122_162 | [LR](A)[sP]•[dR](A)[sP]•[dR](T)[sP]•[LR]([5meC])[sP]•[dR](T)[sP]•[LR](T)[sP]• |
| | [dR](A)[sP]•[dR](T)[sP]•[dR](T)[sP]•[dR](T)[sP]•[dR](A)[sP]•[dR](C)[sP]• |
| | [MOE](A)[sP]•[dR](T)[sP]•[dR](C)[sP]•[dR](T)[sP]•[LR](T)[sP]•[LR]([5meC])[sP]• |
| | [LR]([5meC]) |
| 1122_163 | [LR](A)[sP]•[dR](A)[sP]•[dR](T)[sP]•[LR]([5meC])[sP]•[dR](T)[sP]•[LR](T)[sP]• |
| | [dR](A)[sP]•[dR](T)[sP]•[dR](T)[sP]•[dR](T)[sP]•[MOE](A)[sP]•[dR](C)[sP]• |
| | [dR](A)[sP]•[dR](T)[sP]•[dR](C)[sP]•[dR](T)[sP]•[LR](T)[sP]•[LR]([5meC])[sP]• |
| | [LR]([5meC]) |
| 1122_164 | [LR](A)[sP]•[dR](A)[sP]•[dR](T)[sP]•[LR]([5meC])[sP]•[dR](T)[sP]•[LR](T)[sP]• |
| | [dR](A)[sP]•[dR](T)[sP]•[dR](T)[sP]•[MOE](T)[sP]•[dR](A)[sP]•[dR](C)[sP]• |
| | [dR](A)[sP]•[dR](T)[sP]•[dR](C)[sP]•[dR](T)[sP]•[LR](T)[sP]•[LR]([5meC])[sP]• |
| | [LR]([5meC]) |
| 1122_165 | [LR](A)[sP]•[dR](A)[sP]•[dR](T)[sP]•[LR]([5meC])[sP]•[dR](T)[sP]•[LR](T)[sP]• |
| | [dR](A)[sP]•[dR](T)[sP]•[MOE](T)[sP]•[dR](T)[sP]•[dR](A)[sP]•[dR](C)[sP]• |
| | [dR](A)[sP]•[dR](T)[sP]•[dR](C)[sP]•[dR](T)[sP]•[LR](T)[sP]•[LR]([5meC])[sP]• |
| | [LR]([5meC]) |
| 1122_166 | [LR](A)[sP]•[dR](A)[sP]•[dR](T)[sP]•[LR]([5meC])[sP]•[dR](T)[sP]•[LR](T)[sP]• |
| | [dR](A)[sP]•[MOE](T)[sP]•[dR](T)[sP]•[dR](T)[sP]•[dR](A)[sP]•[dR](C)[sP]• |
| | [dR](A)[sP]•[dR](T)[sP]•[dR](C)[sP]•[dR](T)[sP]•[LR](T)[sP]•[LR]([5meC])[sP]• |
| | [LR]([5meC]) |
| 1122_167 | [LR](A)[sP]•[dR](A)[sP]•[dR](T)[sP]•[LR]([5meC])[sP]•[dR](T)[sP]•[LR](T)[sP]• |
| | [MOE](A)[sP]•[dR](T)[sP]•[dR](T)[sP]•[dR](T)[sP]•[dR](A)[sP]•[dR](C)[sP]• |
| | [dR](A)[sP]•[dR](T)[sP]•[dR](C)[sP]•[dR](T)[sP]•[LR](T)[sP]•[LR]([5meC])[sP]• |
| | [LR]([5meC]) |
| 1122_168 | [LR](A)[sP]•[dR](A)[sP]•[dR](T)[sP]•[LR]([5meC])[sP]•[dR](T)[sP]•[MOE](T)[sP]• |
| | [dR](A)[sP]•[dR](T)[sP]•[dR](T)[sP]•[dR](T)[sP]•[dR](A)[sP]•[dR](C)[sP]• |
| | [dR](A)[sP]•[dR](T)[sP]•[dR](C)[sP]•[dR](T)[sP]•[LR](T)[sP]•[LR]([5meC])[sP]• |
| | [LR]([5meC]) |
| 1122_169 | [LR](A)[sP]•[dR](A)[sP]•[dR](T)[sP]•[LR]([5meC])[sP]•[MOE](T)[sP]•[LR](T)[sP]• |
| | [dR](A)[sP]•[dR](T)[sP]•[dR](T)[sP]•[dR](T)[sP]•[dR](A)[sP]•[dR](C)[sP]• |
| | [dR](A)[sP]•[dR](T)[sP]•[dR](C)[sP]•[dR](T)[sP]•[LR](T)[sP]•[LR]([5meC])[sP]• |
| | [LR]([5meC]) |
| 1122_170 | [LR](A)[sP]•[dR](A)[sP]•[dR](T)[sP]•[MOE]([5meC])[sP]•[dR](T)[sP]•[LR](T)[sP]• |
| | [dR](A)[sP]•[dR](T)[sP]•[dR](T)[sP]•[dR](T)[sP]•[dR](A)[sP]•[dR](C)[sP]• |
| | [dR](A)[sP]•[dR](T)[sP]•[dR](C)[sP]•[dR](T)[sP]•[LR](T)[sP]•[LR]([5meC])[sP]• |
| | [LR]([5meC]) |
| 1122_171 | [LR](A)[sP]•[dR](A)[sP]•[MOE](T)[sP]•[LR]([5meC])[sP]•[dR](T)[sP]•[LR](T)[sP]• |
| | [dR](A)[sP]•[dR](T)[sP]•[dR](T)[sP]•[dR](T)[sP]•[dR](A)[sP]•[dR](C)[sP]• |
| | [dR](A)[sP]•[dR](T)[sP]•[dR](C)[sP]•[dR](T)[sP]•[LR](T)[sP]•[LR]([5meC])[sP]• |
| | [LR]([5meC]) |
| 1122_172 | [LR](A)[sP]•[dR](A)[sP]•[dR](T)[sP]•[LR]([5meC])[sP]•[dR](T)[sP]•[LR](T)[sP]• |
| | [dR](A)[sP]•[dR](T)[sP]•[dR](T)[sP]•[dR](T)[sP]•[dR](A)[sP]•[dR](C)[sP]• |
| | [dR](A)[sP]•[dR](T)[sP]•[mR](C)[sP]•[dR](T)[sP]•[LR](T)[sP]•[LR]([5meC])[sP]• |
| | [LR]([5meC]) |
| 1122_173 | [LR](A)[sP]•[dR](A)[sP]•[dR](T)[sP]•[LR]([5meC])[sP]•[dR](T)[sP]•[LR](T)[sP]• |
| | [dR](A)[sP]•[dR](T)[sP]•[dR](T)[sP]•[dR](T)[sP]•[dR](A)[sP]•[dR](C)[sP]• |
| | [mR](A)[sP]•[dR](T)[sP]•[dR](C)[sP]•[dR](T)[sP]•[LR](T)[sP]•[LR]([5meC])[sP]• |
| | [LR]([5meC]) |
| 1122_174 | [LR](A)[sP]•[dR](A)[sP]•[dR](T)[sP]•[LR]([5meC])[sP]•[dR](T)[sP]•[LR](T)[sP]• |
| | [dR](A)[sP]•[dR](T)[sP]•[dR](T)[sP]•[dR](T)[sP]•[dR](A)[sP]•[mR](C)[sP]• |
| | [dR](A)[sP]•[dR](T)[sP]•[dR](C)[sP]•[dR](T)[sP]•[LR](T)[sP]•[LR]([5meC])[sP]• |
| | [LR]([5meC]) |
| 1122_175 | [LR](A)[sP]•[dR](A)[sP]•[dR](T)[sP]•[LR]([5meC])[sP]•[dR](T)[sP]•[LR](T)[sP]• |
| | [dR](A)[sP]•[dR](T)[sP]•[dR](T)[sP]•[dR](T)[sP]•[mR](A)[sP]•[dR](C)[sP]• |
| | [dR](A)[sP]•[dR](T)[sP]•[dR](C)[sP]•[dR](T)[sP]•[LR](T)[sP]•[LR]([5meC])[sP]• |
| | [LR]([5meC]) |
| 1122_176 | [LR](A)[sP]•[dR](A)[sP]•[dR](T)[sP]•[LR]([5meC])[sP]•[dR](T)[sP]•[LR](T)[sP]• |
| | [mR](A)[sP]•[dR](T)[sP]•[dR](T)[sP]•[dR](T)[sP]•[dR](A)[sP]•[dR](C)[sP]• |
| | [dR](A)[sP]•[dR](T)[sP]•[dR](C)[sP]•[dR](T)[sP]•[LR](T)[sP]•[LR]([5meC])[sP]• |
| | [LR]([5meC]) |
| 1122_177 | [LR](A)[sP]•[dR](A)[sP]•[dR](T)[sP]•[LR]([5meC])[sP]•[dR](T)[sP]•[LR](T)[sP]• |
| | [dR](A)[sP]•[dR](T)[sP]•[dR](T)[sP]•[LR](T)[sP]•[dR](A)[sP]•[dR](C)[sP]• |
| | [dR](A)[sP]•[dR](T)[sP]•[dR](C)[sP]•[dR](T)[sP]•[LR](T)[sP]•[LR]([5meC])[sP]• |
| | [LR]([5meC]) |
| 1122_178 | [LR](A)[sP]•[dR](A)[sP]•[dR](T)[sP]•[LR]([5meC])[sP]•[dR](T)[sP]•[LR](T)[sP]• |
| | [dR](A)[sP]•[dR](T)[sP]•[LR](T)[sP]•[dR](T)[sP]•[dR](A)[sP]•[dR](C)[sP]• |
| | [dR](A)[sP]•[dR](T)[sP]•[dR](C)[sP]•[dR](T)[sP]•[LR](T)[sP]•[LR]([5meC])[sP]• |
| | [LR]([5meC]) |
| 1122_179 | [LR](A)[sP]•[dR](A)[sP]•[dR](T)[sP]•[LR]([5meC])[sP]•[dR](T)[sP]•[LR](T)[sP]• |
| | [dR](A)[sP]•[LR](T)[sP]•[dR](T)[sP]•[dR](T)[sP]•[dR](A)[sP]•[dR](C)[sP]• |
| | [dR](A)[sP]•[dR](T)[sP]•[dR](C)[sP]•[dR](T)[sP]•[LR](T)[sP]•[LR]([5meC])[sP]• |
| | [LR]([5meC]) |
| 1122_180 | [LR](A)[sP]•[dR](A)[sP]•[dR](T)[sP]•[LR]([5meC])[sP]•[dR](T)[sP]•[LR](T)[sP]• |
| | [LR](A)[sP]•[dR](T)[sP]•[dR](T)[sP]•[dR](T)[sP]•[dR](A)[sP]•[dR](C)[sP]• |
| | [dR](A)[sP]•[dR](T)[sP]•[dR](C)[sP]•[dR](T)[sP]•[LR](T)[sP]•[LR]([5meC])[sP]• |
| | [LR]([5meC]) |
| 1122_181 | [LR](A)[sP]•[dR](A)[sP]•[dR](T)[sP]•[LR]([5meC])[sP]•[LR](T)[sP]•[LR](T)[sP]• |
| | [dR](A)[sP]•[dR](T)[sP]•[dR](T)[sP]•[dR](T)[sP]•[dR](A)[sP]•[dR](C)[sP]• |
| | [dR](A)[sP]•[dR](T)[sP]•[dR](C)[sP]•[dR](T)[sP]•[LR](T)[sP]•[LR]([5meC])[sP]• |
| | [LR]([5meC]) |
| 1122_182 | [LR](A)[sP]•[dR](A)[sP]•[LR](T)[sP]•[LR]([5meC])[sP]•[dR](T)[sP]•[LR](T)[sP]• |
| | [dR](A)[sP]•[dR](T)[sP]•[dR](T)[sP]•[dR](T)[sP]•[dR](A)[sP]•[dR](C)[sP]• |
| | [dR](A)[sP]•[dR](T)[sP]•[dR](C)[sP]•[dR](T)[sP]•[LR](T)[sP]•[LR]([5meC])[sP]• |
| | [LR]([5meC]) |
| 1122_183 | [LR](A)[sP]•[dR](A)[sP]•[dR](T)[sP]•[LR]([5meC])[sP]•[dR](T)[sP]•[LR](T)[sP]• |
| | [dR](A)[sP]•[dR](T)[sP]•[dR](T)[sP]•[dR](T)[sP]•[dR](A)[sP]•[dR](C)[sP]• |
| | [dR](A)[sP]•[dR](T)[sP]•[dR](C)[sP]•[dR](T)[sP]•[LR](T)[sP]•[MOE]([5meC])[sP]• |
| | [LR]([5meC]) |
| 1122_184 | [LR](A)[sP]•[dR](A)[sP]•[dR](T)[sP]•[LR]([5meC])[sP]•[dR](T)[sP]•[LR](T)[sP]• |
| | [dR](A)[sP]•[dR](T)[sP]•[dR](T)[sP]•[dR](T)[sP]•[dR](A)[sP]•[dR](C)[sP]• |
| | [dR](A)[sP]•[dR](T)[sP]•[dR](C)[sP]•[dR](T)[sP]•[MOE](T)[sP]•[LR]([5meC])[sP]• |
| | [LR]([5meC]) |
| 1122_185 | [LR](A)[sP]•[dR](A)[sP]•[dR](T)[sP]•[LR]([5meC])[sP]•[dR](T)[sP]•[LR](T)[sP]• |
| | [dR](A)[sP]•[dR](T)[sP]•[dR](T)[sP]•[dR](T)[sP]•[dR](A)[sP]•[dR](C)[sP]• |
| | [dR](A)[sP]•[dR](T)[sP]•[dR](C)[sP]•[MOE](T)[sP]•[LR](T)[sP]•[LR]([5meC])[sP]• |
| | [LR]([5meC]) |
| 1122_186 | [LR](A)[sP]•[LR](A)[sP]•[LR](T)[sP]•[LR]([5meC])[sP]•[dR](T)[sP]•[dR](T)[sP]• |
| | [LR](A)[sP]•[dR](T)[sP]•[dR](T)[sP]•[dR](T)[sP]•[dR](A)[sP]•[dR](C)[sP]• |
| | [dR](A)[sP]•[dR](T)[sP]•[dR](C)[sP]•[LR](T)[sP]•[dR](T)[sP]•[LR]([5meC])[sP]• |
| | [LR]([5meC]) |
| 1122_188 | [MOE](A)[sP]•[MOE](A)[sP]•[MOE](T)[sP]•[MOE]([5meC])[sP]•[dR](T)[sP]•[dR](T)[sP]• |
| | [dR](A)[sP]•[dR](T)[sP]•[dR](T)[sP]•[dR](T)[sP]•[dR](A)[sP]•[dR](C)[sP]•[dR](A)[sP]• |
| | [dR](T)[sP]•[dR](C)[sP]•[MOE](T)[sP]•[dR](T)[sP]•[MOE]([5meC])[sP]•[MOE]([5meC]) |
| 1122_189 | [MOE](A)[sP]•[LR](A)[sP]•[LR](T)[sP]•[LR]([5meC])[sP]•[dR](T)[sP]•[dR](T)[sP]• |
| | [dR](A)[sP]•[dR](T)[sP]•[dR](T)[sP]•[dR](T)[sP]•[dR](A)[sP]•[dR](C)[sP]• |
| | [dR](A)[sP]•[dR](T)[sP]•[dR](C)[sP]•[LR](T)[sP]•[dR](T)[sP]•[LR]([5meC])[sP]• |
| | [MOE]([5meC]) |
| 1122_190 | [MOE](A)[sP]•[MOE](A)P•[MOE](T)P•[MOE]([5meC])[sP]•[dR](T)[sP]•[dR ](T)[sP]• |
| | [dR](A)[sP]•[dR](T)[sP]•[dR](T)[sP]•[dR](T)[sP]•[dR](A)[sP]•[dR](C)[sP]• |
| | [dR](A)[sP]•[dR](T)[sP]•[dR](C)[sP]•[MOE](T)[sP]•[dR](T)[sP]•[MOE]([5meC])[sP]• |
| | [MOE]([5meC]) |
| 1122_191 | [LR](A)[sP]•[fR](A)[sP]•[LR](T)[sP]•[LR]([5meC])[sP]•[dR](T)[sP]•[dR](T)[sP]• |
| | [dR](A)[sP]•[dR](T)[sP]•[dR](T)[sP]•[dR](T)[sP]•[dR](A)[sP]•[dR](C)[sP]• |
| | [dR](A)[sP]•[dR](T)[sP]•[dR](C)[sP]•[LR](T)[sP]•[dR](T)[sP]•[LR]([5meC])[sP]• |
| | [LR]([5meC]) |
| 1122_192 | [LR](A)[sP]•[LR](A)[sP]•[LR](T)[sP]•[LR]([5meC])[sP]•[dR](T)[sP]•[dR](T)[sP]• |
| | [dR](A)[sP]•[dR](T)[sP]•[dR](T)[sP]•[dR](T)[sP]•[dR](A)[sP]•[dR](C)[sP]• |
| | [dR](A)[sP]•[dR](T)[sP]•[fR](C)[sP]•[LR](T)[sP]•[dR](T)[sP]•[LR]([5meC])[sP]• |
| | [LR]([5meC]) |
| 1122_193 | [LR](A)[sP]•[LR](A)[sP]•[LR](T)[sP]•[LR]([5meC])[sP]•[dR](T)[sP]•[dR](T)[sP]• |
| | [dR](A)[sP]•[dR](T)[sP]•[dR](T)[sP]•[dR](T)[sP]•[dR](A)[sP]•[dR](C)[sP]• |
| | [fR](A)[sP]•[dR](T)[sP]•[dR](C)[sP]•[LR](T)[sP]•[dR](T)[sP]•[LR]([5meC])[sP]• |
| | [LR]([5meC]) |
| 1122_194 | [LR](A)[sP]•[LR](A)[sP]•[LR](T)[sP]•[LR]([5meC])[sP]•[dR](T)[sP]•[dR](T)[sP]• |
| | [dR](A)[sP]•[dR](T)[sP]•[dR](T)[sP]•[dR](T)[sP]•[dR](A)[sP]•[fR](C)[sP]• |
| | [dR](A)[sP]•[dR](T)[sP]•[dR](C)[sP]•[LR](T)[sP]•[dR](T)[sP]•[LR]([5meC])]sP]• |
| | [LR]([5meC]) |
| 1122_195 | [LR](A)[sP]•[LR](A)[sP]•[LR](T)[sP]•[LR]([5meC])[sP]•[dR](T)[sP]•[dR](T)[sP]• |
| | [dR](A)[sP]•[dR](T)[sP]•[dR](T)[sP]•[dR](T)[sP]•[fR](A)[sP]•[dR](C)[sP]• |
| | [dR](A)[sP]•[dR](T)[sP]•[dR](C)[sP]•[LR](T)[sP]•[dR](T)[sP]•[LR]([5meC])[sP]• |
| | [LR]([5meC]) |
| 1122_196 | [LR](A)[sP]•[LR](A)[sP]•[LR](T)[sP]•[LR]([5meC])[sP]•[dR](T)[sP]•[dR](T)[sP]• |
| | [fR](A)[sP]•[dR](T)[sP]•[dR](T)[sP]•[dR](T)[sP]•[dR](A)[sP]•[dR](C)[sP]• |
| | [dR](A)[sP]•[dR](T)[sP]•[dR](C)[sP]•[LR](T)[sP]•[dR](T)[sP]•[LR]([5meC])[sP]• |
| | [LR]([5meC]) |
| 1122_197 | [LR](A)[sP]•[LR](A)[sP]•[LR](T)[sP]•[LR]([5meC])[sP]•[dR](T)[sP]•[dR](T)[sP]• |
| | [dR](A)[sP]•[dR](T)[sP]•[dR](T)[sP]•[dR](T)[sP]•[dR](A)[sP]•[dR](C)[sP]• |
| | [dR](A)[sP]•[dR](T)[sP]•[dR](C)[sP]•[LR](T)[sP]•[LR](T)[sP]•[LR]([5meC])[sP]• |
| | [LR]([5meC]) |
| 1122_198 | [LR](A)[sP]•[LR](A)[sP]•[LR](T)[sP]•[LR]([5meC])[sP]•[dR](T)[sP]•[dR](T)[sP]• |
| | [dR](A)[sP]•[dR](T)[sP]•[dR](T)[sP]•[dR](T)[sP]•[dR](A)[sP]•[dR](C)[sP]• |
| | [dR](A)[sP]•[LR](T)[sP]•[dR](C)[sP]•[LR](T)[sP]•[dR](T)[sP]•[LR]([5meC])[sP]• |
| | [LR]([5meC]) |
| 1122_199 | [LR](A)[sP]•[LR](A)[sP]•[LR](T)[sP]•[LR]([5meC])[sP]•[dR](T)[sP]•[dR](T)[sP]• |
| | [dR](A)[sP]•[dR](T)[sP]•[dR](T)[sP]•[dR](T)[sP]•[dR](A)[sP]•[dR](C)[sP]• |
| | [LR](A)[sP]•[dR](T)[sP]•[dR](C)[sP]•[LR](T)[sP]•[dR](T)[sP]•[LR]([5meC])[sP]• |
| | [LR]([5meC]) |
| 1122_200 | [LR](A)[sP]•[LR](A)[sP]•[LR](T)[sP]•[LR]([5meC])[sP]•[dR](T)[sP]•[dR](T)[sP]• |
| | [dR](A)[sP]•[dR](T)[sP]•[dR](T)[sP]•[dR](T)[sP]•[LR](A)[sP]•[dR](C)[sP]• |
| | [dR](A)[sP]•[dR](T)[sP]•[dR](C)[sP]•[LR](T)[sP]•[dR](T)[sP]•[LR]([5meC])]sP]• |
| | [LR]([5meC]) |
| 1122_201 | [LR](A)[sP]•[LR](A)[sP]•[LR](T)[sP]•[LR]([5meC])[sP]•[dR](T)[sP]•[dR](T)[sP]• |
| | [dR](A)[sP]•[dR](T)[sP]•[dR](T)[sP]•[LR](T)[sP]•[dR](A)[sP]•[dR](C)[sP]• |
| | [dR](A)[sP]•[dR](T)[sP]•[dR](C)[sP]•[LR](T)[sP]•[dR](T)[sP]•[LR]([5meC])[sP]• |
| | [LR]([5meC]) |
| 1122_202 | [LR](A)[sP]•[LR](A)[sP]•[LR](T)[sP]•[LR]([5meC])[sP]•[dR](T)[sP]•[dR](T)[sP]• |
| | [dR](A)[sP]•[dR](T)[sP]•[LR](T)[sP]•[dR](T)[sP]•[dR](A)[sP]•[dR](C)[sP]• |
| | [dR](A)[sP]•[dR](T)[sP]•[dR](C)[sP]•[LR](T)[sP]•[dR](T)[sP]•[LR]([5meC])]sP]• |
| | [LR]([5meC]) |
| 1122_203 | [LR](A)[sP]•[LR](A)[sP]•[LR](T)[sP]•[LR]([5meC])[sP]•[dR](T)[sP]•[dR](T)[sP]• |
| | [dR](A)[sP]•[LR](T)[sP]•[dR](T)[sP]•[dR](T)[sP]•[dR](A)[sP]•[dR](C)[sP]• |
| | [dR](A)[sP]•[dR](T)[sP]•[dR](C)[sP]•[LR](T)[sP]•[dR](T)[sP]•[LR]([5meC])]sP]• |
| | [LR]([5meC]) |
| 1122_204 | [LR](A)[sP]•[LR](A)[sP]•[LR](T)[sP]•[LR]([5meC])[sP]•[LR](T)[sP]•[dR](T)[sP]• |
| | [dR](A)[sP]•[dR](T)[sP]•[dR](T)[sP]•[dR](T)[sP]•[dR](A)[sP]•[dR](C)[sP]• |
| | [dR](A)[sP]•[dR](T)[sP]•[dR](C)[sP]•[LR](T)[sP]•[dR](T)[sP]•[LR]([5meC])[sP]• |
| | [LR]([5meC]) |
| 1122_205 | [LR](A)[sP]•[LR](A)[sP]•[LR](T)[sP]•[LR]([5meC])[sP]•[dR](T)[sP]•[dR](T)[sP]• |
| | [dR](A)[sP]•[dR](T)[sP]•[dR](T)[sP]•[dR](T)[sP]•[dR](A)[sP]•[dR](C)[sP]• |
| | [dR](A)[sP]•[dR](T)[sP]•[dR](C)[sP]•[LR](T)[sP]•[dR](T)[sP]•[MOE]([5meC])[sP]• |
| | [LR]([5meC]) |
| 1122_206 | [LR](A)[sP]•[LR](A)[sP]•[LR](T)[sP]•[LR]([5meC])[sP]•[dR](T)[sP]•[dR](T)[sP]• |
| | [dR](A)[sP]•[dR](T)[sP]•[dR](T)[sP]•[dR](T)[sP]•[dR](A)[sP]•[dR](C)[sP]• |
| | [dR](A)[sP]•[dR](T)[sP]•[dR](C)[sP]•[LR](T)[sP]•[MOE](T)[sP]•[LR]([5meC])[sP]• |
| | [LR]([5meC]) |
| 1122_207 | [LR](A)[sP]•[LR](A)[sP]•[LR](T)[sP]•[LR]([5meC])[sP]•[dR](T)[sP]•[dR](T)[sP]• |
| | [dR](A)[sP]•[dR](T)[sP]•[dR](T)[sP]•[dR](T)[sP]•[dR](A)[sP]•[dR](C)[sP]• |
| | [dR](A)[sP]•[dR](T)[sP]•[dR](C)[sP]•[MOE](T)[sP]•[dR](T)[sP]•[LR]([5meC])[sP]• |
| | [LR]([5meC]) |
| 1122_208 | [LR](A)[sP]•[LR](A)[sP]•[LR](T)[sP]•[LR]([5meC])[sP]•[dR](T)[sP]•[dR](T)[sP]• |
| | [dR](A)[sP]•[dR](T)[sP]•[dR](T)[sP]•[dR](T)[sP]•[dR](A)[sP]•[dR](C)[sP]• |
| | [dR](A)[sP]•[MOE](T)[sP]•[dR](C)[sP]•[LR](T)[sP]•[dR](T)[sP]•[LR]([5meC])[sP]• |
| | [LR]([5meC]) |
| 1122_209 | [LR](A)[sP]•[LR](A)[sP]•[LR](T)[sP]•[LR]([5meC])[sP]•[dR](T)[sP]•[dR](T)[sP]• |
| | [dR](A)[sP]•[dR](T)[sP]•[dR](T)[sP]•[dR](T)[sP]•[dR](A)[sP]•[dR](C)[sP]• |
| | [MOE](A)[sP]•[dR](T)[sP]•[dR](C)[sP]•[LR](T)[sP]•[dR](T)[sP]•[LR]([5meC])[sP]• |
| | [LR]([5meC]) |
| 1122_210 | [LR](A)[sP]•[LR](A)[sP]•[LR](T)[sP]•[LR]([5meC])[sP]•[dR](T)[sP]•[dR](T)[sP]• |
| | [dR](A)[sP]•[dR](T)[sP]•[dR](T)[sP]•[dR](T)[sP]•[MOE](A)[sP]•[dR](C)[sP]• |
| | [dR](A)[sP]•[dR](T)[sP]•[dR](C)[sP]•[LR](T)[sP]•[dR](T)[sP]•[LR]([5meC])[sP]• |
| | [LR]([5meC]) |
| 1122_211 | [LR](A)[sP]•[LR](A)[sP]•[LR](T)[sP]•[LR]([5meC])[sP]•[dR](T)[sP]•[dR](T)[sP]• |
| | [dR](A)[sP]•[dR](T)[sP]•[dR](T)[sP]•[MOE](T)[sP]•[dR](A)[sP]•[dR](C)[sP]• |
| | [dR](A)[sP]•[dR](T)[sP]•[dR](C)[sP]•[LR](T)[sP]•[dR](T)[sP]•[LR]([5meC])[sP]• |
| | [LR]([5meC]) |
| 1122_212 | [LR](A)[sP]•[LR](A)[sP]•[LR](T)[sP]•[LR]([5meC])[sP]•[dR](T)[sP]•[dR](T)[sP]• |
| | [dR](A)[sP]•[dR](T)[sP]•[MOE](T)[sP]•[dR](T)[sP]•[dR](A)[sP]•[dR](C)[sP]• |
| | [dR](A)[sP]•[dR](T)[sP]•[dR](C)[sP]•[LR](T)[sP]•[dR](T)[sP]•[LR]([5meC])[sP]• |
| | [LR]([5meC]) |
| 1122_213 | [LR](A)[sP]•[LR](A)[sP]•[LR](T)[sP]•[LR]([5meC])[sP]•[dR](T)[sP]•[dR](T)[sP]• |
| | [dR](A)[sP]•[MOE](T)[sP]•[dR](T)[sP]•[dR](T)[sP]•[dR](A)[sP]•[dR](C)[sP]• |
| | [dR](A)[sP]•[dR](T)[sP]•[dR](C)[sP]•[LR](T)[sP]•[dR](T)[sP]•[LR]([5meC])[sP]• |
| | [LR]([5meC]) |
| 1122_214 | [LR](A)[sP]•[LR](A)[sP]•[LR](T)[sP]•[LR]([5meC])[sP]•[dR](T)[sP]•[dR](T)[sP]• |
| | [MOE](A)[sP]•[dR](T)[sP]•[dR](T)[sP]•[dR](T)[sP]•[dR](A)[sP]•[dR](C)[sP]• |
| | [dR](A)[sP]•[dR](T)[sP]•[dR](C)[sP]•[LR](T)[sP]•[dR](T)[sP]•[LR]([5meC])[sP]• |
| | [LR]([5meC]) |
| 1122_215 | [LR](A)[sP]•[LR](A)[sP]•[LR](T)[sP]•[LR]([5meC])[sP]•[dR](T)[sP]•[MOE](T)[sP]• |
| | [dR](A)[sP]•[dR](T)[sP]•[dR](T)[sP]•[dR](T)[sP]•[dR](A)[sP]•[dR](C)[sP]• |
| | [dR](A)[sP]•[dR](T)[sP]•[dR](C)[sP]•[LR](T)[sP]•[dR](T)[sP]•[LR]([5meC])[sP]• |
| | [LR]([5meC]) |
| 1122_216 | [LR](A)[sP]•[LR](A)[sP]•[LR](T)[sP]•[LR]([5meC])[sP]•[MOE](T)[sP]•[dR](T)[sP]• |
| | [dR](A)[sP]•[dR](T)[sP]•[dR](T)[sP]•[dR](T)[sP]•[dR](A)[sP]•[dR](C)[sP]• |
| | [dR](A)[sP]•[dR](T)[sP]•[dR](C)[sP]•[LR](T)[sP]•[dR](T)[sP]•[LR]([5meC])[sP]• |
| | [LR]([5meC]) |
| 1122_217 | [LR](A)[sP]•[LR](A)[sP]•[LR](T)[sP]•[MOE]([5meC])[sP]•[dR](T)[sP]•[dR](T)[sP]• |
| | [dR](A)[sP]•[dR](T)[sP]•[dR](T)[sP]•[dR](T)[sP]•[dR](A)[sP]•[dR](C)[sP]• |
| | [dR](A)[sP]•[dR](T)[sP]•[dR](C)[sP]•[LR](T)[sP]•[dR](T)[sP]•[LR]([5meC])[sP]• |
| | [LR]([5meC]) |
| 1122_218 | [LR](A)[sP]•[LR](A)[sP]•[MOE](T)[sP]•[LR]([5meC])[sP]•[dR](T)[sP]•[dR](T)[sP]• |
| | [dR](A)[sP]•[dR](T)[sP]•[dR](T)[sP]•[dR](T)[sP]•[dR](A)[sP]•[dR](C)[sP]• |
| | [dR](A)[sP]•[dR](T)[sP]•[dR](C)[sP]•[LR](T)[sP]•[dR](T)[sP]•[LR]([5meC])[sP]• |
| | [LR]([5meC]) |
| 1122_219 | [LR](A)[sP]•[MOE](A)[sP]•[LR](T)[sP]•[LR]([5meC])[sP]•[dR](T)[sP]•[dR](T)[sP]• |
| | [dR](A)[sP]•[dR](T)[sP]•[dR](T)[sP]•[dR](T)[sP]•[dR](A)[sP]•[dR](C)[sP]• |
| | [dR](A)[sP]•[dR](T)[sP]•[dR](C)[sP]•[LR](T)[sP]•[dR](T)[sP]•[LR]([5meC])[sP]• |
| | [LR]([5meC]) |
| 1122_220 | [LR](A)[sP]•[LR](A)[sP]•[LR](T)[sP]•[LR]([5meC])[sP]•[dR](T)[sP]•[dR](T)[sP]• |
| | [dR](A)[sP]•[dR](T)[sP]•[dR](T)[sP]•[dR](T)[sP]•[dR](A)[sP]•[dR](C)[sP]• |
| | [dR](A)[sP]•[dR](T)[sP]•[mR](C)[sP]•[LR](T)[sP]•[dR](T)[sP]•[LR]([5meC])[sP]• |
| | [LR]([5meC]) |
| 1122_221 | [LR](A)[sP]•[LR](A)[sP]•[LR](T)[sP]•[LR]([5meC])[sP]•[dR](T)[sP]•[dR](T)[sP]• |
| | [dR](A)[sP]•[dR](T)[sP]•[dR](T)[sP]•[dR](T)[sP]•[dR](A)[sP]•[dR](C)[sP]• |
| | [mR](A)[sP]•[dR](T)[sP]•[dR](C)[sP]•[LR](T)[sP]•[dR](T)[sP]•[LR]([5meC])[sP]• |
| | [LR]([5meC]) |
| 1122_222 | [LR](A)[sP]•[LR](A)[sP]•[LR](T)[sP]•[LR]([5meC])[sP]•[dR](T)[sP]•[dR](T)[sP]• |
| | [dR](A)[sP]•[dR](T)[sP]•[dR](T)[sP]•[dR](T)[sP]•[dR](A)[sP]•[mR](C)[sP]• |
| | [dR](A)[sP]•[dR](T)[sP]•[dR](C)[sP]•[LR](T)[sP]•[dR](T)[sP]•[LR]([5meC])[sP]• |
| | [LR]([5meC]) |
| 1122_223 | [LR](A)[sP]•[LR](A)[sP]•[LR](T)[sP]•[LR]([5meC])[sP]•[dR](T)[sP]•[dR](T)[sP]• |
| | [dR](A)[sP]•[dR](T)[sP]•[dR](T)[sP]•[dR](T)[sP]•[mR](A)[sP]•[dR](C)[sP]• |
| | [dR](A)[sP]•[dR](T)[sP]•[dR](C)[sP]•[LR](T)[sP]•[dR](T)[sP]•[LR]([5meC])[sP]• |
| | [LR]([5meC]) |
| 1122_224 | [LR](A)[sP]•[LR](A)[sP]•[LR](T)[sP]•[LR]([5meC])[sP]•[dR](T)[sP]•[dR](T)[sP]• |
| | [mR](A)[sP]•[dR](T)[sP]•[dR](T)[sP]•[dR](T)[sP]•[dR](A)[sP]•[dR](C)[sP]• |
| | [dR](A)[sP]•[dR](T)[sP]•[dR](C)[sP]•[LR](T)[sP]•[dR](T)[sP]•[LR]([5meC])[sP]• |
| | [LR]([5meC]) |
| 1122_225 | [LR](A)[sP]•[mR](A)[sP]•[LR](T)[sP]•[LR]([5meC])[sP]•[dR](T)[sP]•[dR](T)[sP]• |
| | [dR](A)[sP]•[dR](T)[sP]•[dR](T)[sP]•[dR](T)[sP]•[dR](A)[sP]•[dR](C)[sP]• |
| | [dR](A)[sP]•[dR](T)[sP]•[dR](C)[sP]•[LR](T)[sP]•[dR](T)[sP]•[LR]([5meC])[sP]• |
| | [LR]([5meC]) |
| 1122_226 | [MOE](A)[sP]•[dR](A)[sP]•[dR](T)[sP]•[MOE]([5meC])[sP]•[dR](T)[sP]•[MOE](T)[sP]• |
| | [dR](A)[sP]•[dR](T)[sP]•[dR](T)[sP]•[dR](T)[sP]•[dR](A)[sP]•[dR](C)[sP]• |
| | [dR](A)[sP]•[dR](T)[sP]•[dR](C)[sP]•[dR](T)[sP]•[MOE](T)[sP]•[MOE]([5meC])[sP]• |
| | [MOE]([5meC]) |
| 1122_227 | [MOE](A)[sP]•[dR](A)[sP]•[dR](T)[sP]•[LR]([5meC])[sP]•[dR](T)[sP]•[LR](T)[sP]• |
| | [dR](A)[sP]•[dR](T)[sP]•[dR](T)[sP]•[dR](T)[sP]•[dR](A)[sP]•[dR](C)[sP]• |
| | [dR](A)[sP]•[dR](T)[sP]•[dR](C)[sP]•[dR](T)[sP]•[LR](T)[sP]•[LR]([5meC])[sP]• |
| | [MOE]([5meC]) |
| 1122_228 | [MOE](A)[sP]•[LR](A)[sP]•[LR](T)[sP]•[LR]([5meC])[sP]•[dR](T)[sP]•[LR](T)[sP]• |
| | [dR](A)[sP]•[dR](T)[sP]•[dR](T)[sP]•[dR](T)[sP]•[dR](A)[sP]•[dR](C)[sP]• |
| | [dR](A)[sP]•[dR](T)[sP]•[dR](C)[sP]•[dR](T)[sP]•[LR](T)[sP]•[LR]([5meC])[sP]• |
| | [LR]([5meC]) |
| 1122_229 | [LR](A)[sP]•[fR](A)[sP]•[dR](T)[sP]•[LR]([5meC])[sP]•[dR](T)[sP]•[LR](T)[ sP]• |
| | [dR](A)[sP]•[dR](T)[sP]•[dR](T)[sP]•[dR](T)[sP]•[dR](A)[sP]•[dR](C)[sP]• |
| | [dR](A)[sP]•[dR](T)[sP]•[dR](C)[sP]•[dR](T)[sP]•[LR](T)[sP]•[LR]([5meC] )[sP]• |
| | [LR]([5meC]) |
| 1122_230 | [LR](A)[sP]•[LR](A)[sP]•[dR](T)[sP]•[LR]([5meC])[sP]•[dR](T)[sP]•[LR](T)[sP]• |
| | [dR](A)[sP]•[dR](T)[sP]•[dR](T)[sP]•[dR](T)[sP]•[dR](A)[sP]•[dR](C)[sP]• |
| | [dR](A)[sP]•[dR](T)[sP]•[dR](C)[sP]•[dR](T)[sP]•[LR](T)[sP]•[LR]([5meC])[sP]• |
| | [LR]([5meC]) |
| 1122_231 | [LR](A)[sP]•[MOE](A)[sP]•[dR](T)[sP]•[LR]([5meC])[sP]•[dR](T)[sP]•[LR](T)[sP]• |
| | [dR](A)[sP]•[dR](T)[sP]•[dR](T)[sP]•[dR](T)[sP]•[dR](A)[sP]•[dR](C)[sP]• |
| | [dR](A)[sP]•[dR](T)[sP]•[dR](C)[sP]•[dR](T)[sP]•[LR](T)[sP]•[LR]([5meC])[sP]• |
| | [LR]([5meC]) |
| 1122_232 | [LR](A)[sP]•[mR](A)[sP]•[dR](T)[sP]•[LR]([5meC])[sP]•[dR](T)[sP]•[LR](T)[sP]• |
| | [dR](A)[sP]•[dR](T)[sP]•[dR](T)[sP]•[dR](T)[sP]•[dR](A)[sP]•[dR](C)[sP]• |
| | [dR](A)[sP]•[dR](T)[sP]•[dR](C)[sP]•[dR](T)[sP]•[LR](T)[sP]•[LR]([5meC])[sP]• |
| | [LR]([5meC]) |
| 1122_233 | [LR](A)[sP]•[MOE](A)P•[MOE](T)[sP]•[LR]([5meC])[sP]•[dR](T)[sP]•[LR](T)[sP]• |
| | [dR](A)[sP]•[dR](T)[sP]•[dR](T)[sP]•[dR](T)[sP]•[dR](A)[sP]•[dR](C)[sP]• |
| | [dR](A)[sP]•[dR](T)[sP]•[dR](C)[sP]•[dR](T)[sP]•[LR](T)[sP]•[LR]([5meC])[sP]• |
| | [LR]([5meC]) |
| 1122_234 | [LR](A)[sP]•[LR](A)[sP]•[LR](T)[sP]•[LR]([5meC])[sP]•[dR](T)[sP]•[LR](T)[sP]• |
| | [dR](A)[sP]•[dR](T)[sP]•[dR](T)[sP]•[dR](T)[sP]•[dR](A)[sP]•[dR](C)[sP]• |
| | [dR](A)[sP]•[dR](T)[sP]•[dR](C)[sP]•[dR](T)[sP]•[LR](T)[sP]•[LR]([5meC])[sP]• |
| | [LR]([5meC]) |
| 1122_235 | [LR](A)[sP]•[MOE](A)[sP]•[MOE](T)[sP]•[LR]([5meC])[sP]•[dR](T)[sP]•[LR](T)[sP]• |
| | [dR](A)[sP]•[dR](T)[sP]•[dR](T)[sP]•[dR](T)[sP]•[dR](A)[sP]•[dR](C)[sP]• |
| | [dR](A)[sP]•[dR](T)[sP]•[dR](C)[sP]•[dR](T)[sP]•[LR](T)[sP]•[LR]([5meC])[sP]• |
| | [LR]([5meC]) |
| 1122_236 | [LR](A)[sP]•[dR](A)[sP]•[dR](T)[sP]•[LR]([5meC])[sP]•[dR](T)[sP]•[LR](T)[sP]• |
| | [dR](A)[sP]•[dR](T)[sP]•[dR](T)[sP]•[dR](T)[sP]•[dR](A)[sP]•[dR](C)[sP]• |
| | [dR](A)[sP]•[dR](T)[sP]•[fR](C)[sP]•[dR](T)[sP]•[LR](T)[sP]•[LR]([5meC])[sP]• |
| | [LR]([5meC]) |
| 1122_237 | [LR](A)[sP]•[dR](A)[sP]•[dR](T)[sP]•[LR]([5meC])[sP]•[dR](T)[sP]•[LR](T)[sP]• |
| | [dR](A)[sP]•[dR](T)[sP]•[dR](T)[sP]•[dR](T)[sP]•[dR](A)[sP]•[dR](C)[sP]• |
| | [fR](A)[sP]•[dR](T)[sP]•[dR](C)[sP]•[dR](T)[sP]•[LR](T)[sP]•[LR]([5meC])[sP]• |
| | [LR]([5meC]) |
| 1122_238 | [MOE](A)[sP]•[dR](A)[sP]•[dR](T)[sP]•[MOE]([5meC])[sP]•[dR](T)[sP]•[MOE](T)[sP]• |
| | [dR](A)[sP]•[dR](T)[sP]•[dR](T)[sP]•[dR](T)[sP]•[dR](A)[sP]•[dR](C)[sP]• |
| | [dR](A)[sP]•[dR](T)[sP]•[dR](C)[sP]•[MOE](T)[sP]•[dR](T)[sP]•[MOE]([5meC])[sP]• |
| | [MOE]([5meC]) |
| 1122_239 | [MOE](A)[sP]•[dR](A)[sP]•[dR](T)[sP]•[LR]([5meC])[sP]•[dR](T)[sP]•[LR](T)[sP]• |
| | [dR](A)[sP]•[dR](T)[sP]•[dR](T)[sP]•[dR](T)[sP]•[dR](A)[sP]•[dR](C)[sP]• |
| | [dR](A)[sP]•[dR](T)[sP]•[dR](C)[sP]•[LR](T)[sP]•[dR](T)[sP]•[LR]([5meC])[sP]• |
| | [MOE]([5meC]) |
| 1122_240 | [MOE](A)[sP]•[LR](A)[sP]•[LR](T)[sP]•[LR]([5meC])[sP]•[dR](T)[sP]•[LR](T)[sP]• |
| | [dR](A)[sP]•[dR](T)[sP]•[dR](T)[sP]•[dR](T)[sP]•[dR](A)[sP]•[dR](C)[sP]• |
| | [dR](A)[sP]•[dR](T)[sP]•[dR](C)[sP]•[LR](T)[sP]•[dR](T)[sP]•[LR]([5meC])[sP]• |
| | [LR]([5meC]) |
| 1122_241 | [LR](A)[sP]•[fR](A)[sP]•[dR](T)[sP]•[LR]([5meC])[sP]•[dR](T)[sP]•[LR](T)[sP]• |
| | [dR](A)[sP]•[dR](T)[sP]•[dR](T)[sP]•[dR](T)[sP]•[dR](A)[sP]•[dR](C)[sP]• |
| | [dR](A)[sP]•[dR](T)[sP]•[dR](C)[sP]•[LR](T)[sP]•[dR](T)[sP]•[LR]([5meC])[sP]• |
| | [LR]([5meC]) |
| 1122_242 | [LR](A)[sP]•[MOE](A)[sP]•[dR](T)[sP]•[LR]([5meC])[sP]•[dR](T)[sP]•[LR](T)[sP]• |
| | [dR](A)[sP]•[dR](T)[sP]•[dR](T)[sP]•[dR](T)[sP]•[dR](A)[sP]•[dR](C)[sP]• |
| | [dR](A)[sP]•[dR](T)[sP]•[dR](C)[sP]•[LR](T)[sP]•[dR](T)[sP]•[LR]([5meC])[sP]• |
| | [LR]([5meC]) |
| 1122_243 | [LR](A)[sP]•[mR](A)[sP]•[dR](T)[sP]•[LR]([5meC])[sP]•[dR](T)[sP]•[LR](T)[sP]• |
| | [dR](A)[sP]•[dR](T)[sP]•[dR](T)[sP]•[dR](T)[sP]•[dR](A)[sP]•[dR](C)[sP]• |
| | [dR](A)[sP]•[dR](T)[sP]•[dR](C)[sP]•[LR](T)[sP]•[dR](T)[sP]•[LR]([5meC])[sP]• |
| | [LR]([5meC]) |
| 1122_244 | [LR](A)[sP]•[MOE](A)P•[MOE](T)[sP]•[LR]([5meC])[sP]•[dR](T)[sP]•[LR](T)[sP]• |
| | [dR](A)[sP]•[dR](T)[sP]•[dR](T)[sP]•[dR](T)[sP]•[dR](A)[sP]•[dR](C)[sP]• |
| | [dR](A)[sP]•[dR](T)[sP]•[dR](C)[sP]•[LR](T)[sP]•[dR](T)[sP]•[LR]([5meC])[sP]• |
| | [LR]([5meC]) |
| 1122_245 | [LR](A)[sP]•[LR](A)[sP]•[LR](T)[sP]•[LR]([5meC])[sP]•[dR](T)[sP]•[LR](T)[sP]• |
| | [dR](A)[sP]•[dR](T)[sP]•[dR](T)[sP]•[dR](T)[sP]•[dR](A)[sP]•[dR](C)[sP]• |
| | [dR](A)[sP]•[dR](T)[sP]•[dR](C)[sP]•[LR](T)[sP]•[dR](T)[sP]•[LR]([5meC])[sP]• |
| | [LR]([5meC]) |
| 1122_247 | [LR](A)[sP]•[MOE](A)[sP]•[MOE](T)[sP]•[LR]([5meC])[sP]•[dR](T)[sP]•[LR](T)[sP]• |
| | [dR](A)[sP]•[dR](T)[sP]•[dR](T)[sP]•[dR](T)[sP]•[dR](A)[sP]•[dR](C)[sP]• |
| | [dR](A)[sP]•[dR](T)[sP]•[dR](C)[sP]•[LR](T)[sP]•[dR](T)[sP]•[LR]([5meC])[sP]• |
| | [LR]([5meC]) |
| 1122_248 | [MOE](A)[sP]•[MOE](A)[sP]•[dR](T)[sP]•[MOE]([5meC])[sP]•[MOE](T)[sP]•[dR](T)[sP]• |
| | [mR](A)[sP]•[dR](T)[sP]•[dR](T)[sP]•[dR](T)[sP]•[dR](A)[sP]•[dR](C)[sP]• |
| | [dR](A)[sP]•[dR](T)[sP]•[dR](C)[sP]•[dR](T)[sP]•[MOE](T)[sP]•[MOE]([5meC])[sP]• |
| | [MOE]([5meC]) |
| 1122_249 | [MOE](A)[sP]•[LR](A)[sP]•[dR](T)[sP]•[LR]([5meC])[sP]•[LR](T)[sP]•[dR](T)[sP]• |
| | [mR](A)[sP]•[dR](T)[sP]•[dR](T)[sP]•[dR](T)[sP]•[dR](A)[sP]•[dR](C)[sP]• |
| | [dR](A)[sP]•[dR](T)[sP]•[dR](C)[sP]•[dR](T)[sP]•[LR](T)[sP]•[LR]([5meC])[sP]• |
| | [MOE]([5meC]) |
| 1122_250 | [MOE](A)[sP]•[MOE](A)[sP]•[dR](T)[sP]•[MOE]([5meC])P•[MOE](T)[sP]•[dR](T)[sP]• |
| | [mR](A)[sP]•[dR](T)[sP]•[dR](T)[sP]•[dR](T)[sP]•[dR](A)[sP]•[dR](C)[sP]• |
| | [dR](A)[sP]•[dR](T)[sP]•[dR](C)[sP]•[dR](T)[sP]•[MOE](T)[sP]•[MOE]([5meC])[sP]• |
| | [MOE]([5meC]) |
| 1122_251 | [MOE](A)[sP]•[MOE](A)[sP]•[dR](T)[sP]•[MOE]([5meC])[sP]•[dR](T)[sP]•[dR](T)[sP]• |
| | [MOE](A)[sP]•[dR](T)[sP]•[dR](T)[sP]•[dR](T)[sP]•[dR](A)[sP]•[dR](C)[sP]• |
| | [dR](A)[sP]•[dR](T)[sP]•[dR](C)[sP]•[MOE](T)[sP]•[dR](T)[sP]•[MOE]([5meC])[sP]• |
| | [MOE]([5meC]) |
| 1122_252 | [MOE](A)[sP]•[LR](A)[sP]•[dR](T)[sP]•[LR]([5meC])[sP]•[dR](T)[sP]•[dR](T)[sP]• |
| | [LR](A)[sP]•[dR](T)[sP]•[dR](T)[sP]•[dR](T)[sP]•[dR](A)[sP]•[dR](C)[sP]• |
| | [dR](A)[sP]•[dR](T)[sP]•[dR](C)[sP]•[LR](T)[sP]•[dR](T)[sP]•[LR]([5meC])[sP]• |
| | [MOE]([5meC]) |
| 1122_253 | [LR](A)[sP]•[fR](A)[sP]•[dR](T)[sP]•[LR]([5meC])[sP]•[dR](T)[sP]•[dR](T)[sP]• |
| | [LR](A)[sP]•[dR](T)[sP]•[dR](T)[sP]•[dR](T)[sP]•[dR](A)[sP]•[dR](C)[sP]• |
| | [dR](A)[sP]•[dR](T)[sP]•[dR](C)[sP]•[LR](T)[sP]•[dR](T)[sP]•[LR]([5meC])[sP]• |
| | [LR]([5meC]) |
| 1122_254 | [LR](A)[sP]•[LR](A)[sP]•[dR](T)[sP]•[LR]([5meC])[sP]•[dR](T)[sP]•[dR](T)[sP]• |
| | [fR](A)[sP]•[dR](T)[sP]•[dR](T)[sP]•[dR](T)[sP]•[dR](A)[sP]•[dR](C)[sP]• |
| | [dR](A)[sP]•[dR](T)[sP]•[dR](C)[sP]•[LR](T)[sP]•[dR](T)[sP]•[LR]([5meC])[sP]• |
| | [LR]([5meC]) |
| 1122_255 | [LR](A)[sP]•[LR](A)[sP]•[dR](T)[sP]•[LR]([5meC])[sP]•[dR](T)[sP]•[dR](T)[sP]• |
| | [LR](A)[sP]•[dR](T)[sP]•[dR](T)[sP]•[dR](T)[sP]•[dR](A)[sP]•[dR](C)[sP]• |
| | [dR](A)[sP]•[dR](T)[sP]•[fR](C)[sP]•[LR](T)[sP]•[dR](T)[sP]•[LR]([5meC])[sP]• |
| | [LR]([5meC]) |
| 1122_256 | [LR](A)[sP]•[LR](A)[sP]•[dR](T)[sP]•[LR]([5meC])[sP]•[dR](T)[sP]•[dR](T)[sP]• |
| | [LR](A)[sP]•[dR](T)[sP]•[dR](T)[sP]•[dR](T)[sP]•[dR](A)[sP]•[dR](C)[sP]• |
| | [fR](A)[sP]•[dR](T)[sP]•[dR](C)[sP]•[LR](T)[sP]•[dR](T)[sP]•[LR]([5meC])[sP]• |
| | [LR]([5meC]) |
| 1122_257 | [LR](A)[sP]•[LR](A)[sP]•[dR](T)[sP]•[LR]([5meC])[sP]•[dR](T)[sP]•[dR](T)[sP]• |
| | [LR](A)[sP]•[dR](T)[sP]•[dR](T)[sP]•[dR](T)[sP]•[dR](A)[sP]•[fR](C)[sP]• |
| | [dR](A)[sP]•[dR](T)[sP]•[dR](C)[sP]•[LR](T)[sP]•[dR](T)[sP]•[LR]([5meC])[sP]• |
| | [LR]([5meC]) |
| 1122_258 | [LR](A)[sP]•[LR](A)[sP]•[dR](T)[sP]•[LR]([5meC])[sP]•[dR](T)[sP]•[dR](T)[sP]• |
| | [LR](A)[sP]•[dR](T)[sP]•[dR](T)[sP]•[dR](T)[sP]•[fR](A)[sP]•[dR](C)[sP]• |
| | [dR](A)[sP]•[dR](T)[sP]•[dR](C)[sP]•[LR](T)[sP]•[dR](T)[sP]•[LR]([5meC])[sP]• |
| | [LR]([5meC]) |
| 1122_259 | [LR](A)[sP]•[LR](A)[sP]•[dR](T)[sP]•[LR]([5meC])[sP]•[dR](T)[sP]•[dR](T)[sP]• |
| | [LR](A)[sP]•[dR](T)[sP]•[dR](T)[sP]•[dR](T)[sP]•[dR](A)[sP]•[dR](C)[sP]• |
| | [dR](A)[sP]•[dR](T)[sP]•[dR](C)[sP]•[LR](T)[sP]•[LR](T)[sP]•[LR]([5meC])[sP]• |
| | [LR]([5meC]) |
| 1122_260 | [LR](A)[sP]•[LR](A)[sP]•[dR](T)[sP]•[LR]([5meC])[sP]•[dR](T)[sP]•[dR](T)[sP]• |
| | [LR](A)[sP]•[dR](T)[sP]•[dR](T)[sP]•[dR](T)[sP]•[dR](A)[sP]•[dR](C)[sP]• |
| | [dR](A)[sP]•[LR](T)[sP]•[dR](C)[sP]•[LR](T)[sP]•[dR](T)[sP]•[LR]([5meC])[sP]• |
| | [LR]([5meC]) |
| 1122_261 | [LR](A)[sP]•[LR](A)[sP]•[dR](T)[sP]•[LR]([5meC])[sP]•[dR](T)[sP]•[dR](T)[sP]• |
| | [LR](A)[sP]•[dR](T)[sP]•[dR](T)[sP]•[dR](T)[sP]•[dR](A)[sP]•[dR](C)[sP]• |
| | [LR](A)[sP]•[dR](T)[sP]•[dR](C)[sP]•[LR](T)[sP]•[dR](T)[sP]•[LR]([5meC])[sP]• |
| | [LR]([5meC]) |
| 1122_262 | [LR](A)[sP]•[LR](A)[sP]•[dR](T)[sP]•[LR]([5meC])[sP]•[dR](T)[sP]•[dR](T)[sP]• |
| | [LR](A)[sP]•[dR](T)[sP]•[dR](T)[sP]•[dR](T)[sP]•[LR](A)[sP]•[dR](C)[sP]• |
| | [dR](A)[sP]•[dR](T)[sP]•[dR](C)[sP]•[LR](T)[sP]•[dR](T)[sP]•[LR]([5meC])[sP]• |
| | [LR]([5meC]) |
| 1122_263 | [LR](A)[sP]•[LR](A)[sP]•[dR](T)[sP]•[LR]([5meC])[sP]•[dR](T)[sP]•[dR](T)[sP]• |
| | [LR](A)[sP]•[dR](T)[sP]•[dR](T)[sP]•[LR](T)[sP]•[dR](A)[sP]•[dR](C)[sP]• |
| | [dR](A)[sP]•[dR](T)[sP]•[dR](C)[sP]•[LR](T)[sP]•[dR](T)[sP]•[LR]([5meC])[sP]• |
| | [LR]([5meC]) |
| 1122_264 | [LR](A)[sP]•[LR](A)[sP]•[dR](T)[sP]•[LR]([5meC])[sP]•[dR](T)[sP]•[dR](T)[sP]• |
| | [LR](A)[sP]•[dR](T)[sP]•[LR](T)[sP]•[dR](T)[sP]•[dR](A)[sP]•[dR](C)[sP]• |
| | [dR](A)[sP]•[dR](T)[sP]•[dR](C)[sP]•[LR](T)[sP]•[dR](T)[sP]•[LR]([5meC])[sP]• |
| | [LR]([5meC]) |
| 1122_265 | [LR](A)[sP]•[LR](A)[sP]•[dR](T)[sP]•[LR]([5meC])[sP]•[dR](T)[sP]•[dR](T)[sP]• |
| | [LR](A)[sP]•[LR](T)[sP]•[dR](T)[sP]•[dR](T)[sP]•[dR](A)[sP]•[dR](C)[sP]• |
| | [dR](A)[sP]•[dR](T)[sP]•[dR](C)[sP]•[LR](T)[sP]•[dR](T)[sP]•[LR]([5meC])[sP]• |
| | [LR]([5meC]) |
| 1122_266 | [LR](A)[sP]•[LR](A)[sP]•[dR](T)[sP]•[LR]([5meC])[sP]•[dR](T)[sP]•[LR](T)[sP]• |
| | [LR](A)[sP]•[dR](T)[sP]•[dR](T)[sP]•[dR](T)[sP]•[dR](A)[sP]•[dR](C)[sP]• |
| | [dR](A)[sP]•[dR](T)[sP]•[dR](C)[sP]•[LR](T)[sP]•[dR](T)[sP]•[LR]([5meC])[sP]• |
| | [LR]([5meC]) |
| 1122_267 | [LR](A)[sP]•[LR](A)[sP]•[dR](T)[sP]•[LR]([5meC])[sP]•[LR](T)[sP]•[dR](T)[sP]• |
| | [LR](A)[sP]•[dR](T)[sP]•[dR](T)[sP]•[dR](T)[sP]•[dR](A)[sP]•[dR](C)[sP]• |
| | [dR](A)[sP]•[dR](T)[sP]•[dR](C)[sP]•[LR](T)[sP]•[dR](T)[sP]•[LR]([5meC])[sP]• |
| | [LR]([5meC]) |
| 1122_268 | [LR](A)[sP]•[LR](A)[sP]•[dR](T)[sP]•[LR]([5meC])[sP]•[dR](T)[sP]•[dR](T)[sP]• |
| | [LR](A)[sP]•[dR](T)[sP]•[dR](T)[sP]•[dR](T)[sP]•[dR](A)[sP]•[dR](C)[sP]• |
| | [dR](A)[sP]•[dR](T)[sP]•[dR](C)[sP]•[LR](T)[sP]•[dR](T)[sP]•[MOE]([5meC])[sP]• |
| | [LR]([5meC]) |
| 1122_269 | [LR](A)[sP]•[LR](A)[sP]•[dR](T)[sP]•[LR]([5meC])[sP]•[dR](T)[sP]•[dR](T)[sP]• |
| | [LR](A)[sP]•[dR](T)[sP]•[dR](T)[sP]•[dR](T)[sP]•[dR](A)[sP]•[dR](C)[sP]• |
| | [dR](A)[sP]•[dR](T)[sP]•[dR](C)[sP]•[LR](T)[sP]•[MOE](T)[sP]•[LR]([5meC])[sP]• |
| | [LR]([5meC]) |
| 1122_270 | [LR](A)[sP]•[LR](A)[sP]•[dR](T)[sP]•[LR]([5meC])[sP]•[dR](T)[sP]•[dR](T)[sP]• |
| | [LR](A)[sP]•[dR](T)[sP]•[dR](T)[sP]•[dR](T)[sP]•[dR](A)[sP]•[dR](C)[sP]• |
| | [dR](A)[sP]•[dR](T)[sP]•[dR](C)[sP]•[MOE](T)[sP]•[dR](T)[sP]•[LR]([5meC])[sP]• |
| | [LR]([5meC]) |
| 1122_271 | [LR](A)[sP]•[LR](A)[sP]•[dR](T)[sP]•[LR]([5meC])[sP]•[dR](T)[sP]•[dR](T)[sP]• |
| | [LR](A)[sP]•[dR](T)[sP]•[dR](T)[sP]•[dR](T)[sP]•[dR](A)[sP]•[dR](C)[sP]• |
| | [dR](A)[sP]•[MOE](T)[sP]•[dR](C)[sP]•[LR](T)[sP]•[dR](T)[sP]•[LR]([5meC])[sP]• |
| | [LR]([5meC]) |
| 1122_272 | [LR](A)[sP]•[LR](A)[sP]•[dR](T)[sP]•[LR]([5meC])[sP]•[dR](T)[sP]•[dR](T)[sP]• |
| | [LR](A)[sP]•[dR](T)[sP]•[dR](T)[sP]•[dR](T)[sP]•[dR](A)[sP]•[dR](C)[sP]• |
| | [MOE](A)[sP]•[dR](T)[sP]•[dR](C)[sP]•[LR](T)[sP]•[dR](T)[sP]•[LR]([5meC])[sP]• |
| | [LR]([5meC]) |
| 1122_273 | [LR](A)[sP]•[LR](A)[sP]•[dR](T)[sP]•[LR]([5meC])[sP]•[dR](T)[sP]•[dR](T)[sP]• |
| | [LR](A)[sP]•[dR](T)[sP]•[dR](T)[sP]•[dR](T)[sP]•[MOE](A)[sP]•[dR](C)[sP]• |
| | [dR](A)[sP]•[dR](T)[sP]•[dR](C)[sP]•[LR](T)[sP]•[dR](T)[sP]•[LR]([5meC])[sP]• |
| | [LR]([5meC]) |
| 1122_274 | [LR](A)[sP]•[LR](A)[sP]•[dR](T)[sP]•[LR]([5meC])[sP]•[dR](T)[sP]•[dR](T)[sP]• |
| | [LR](A)[sP]•[dR](T)[sP]•[dR](T)[sP]•[MOE](T)[sP]•[dR](A)[sP]•[dR](C)[sP]• |
| | [dR](A)[sP]•[dR](T)[sP]•[dR](C)[sP]•[LR](T)[sP]•[dR](T)[sP]•[LR]([5meC])[sP]• |
| | [LR]([5meC]) |
| 1122_275 | [LR](A)[sP]•[LR](A)[sP]•[dR](T)[sP]•[LR]([5meC])[sP]•[dR](T)[sP]•[dR](T)[sP]• |
| | [LR](A)[sP]•[dR](T)[sP]•[MOE](T)[sP]•[dR](T)[sP]•[dR](A)[sP]•[dR](C)[sP]• |
| | [dR](A)[sP]•[dR](T)[sP]•[dR](C)[sP]•[LR](T)[sP]•[dR](T)[sP]•[LR]([5meC])[sP]• |
| | [LR]([5meC]) |
| 1122_276 | [LR](A)[sP]•[LR](A)[sP]•[dR](T)[sP]•[LR]([5meC])[sP]•[dR](T)[sP]•[dR](T)[sP]• |
| | [LR](A)[sP]•[MOE](T)[sP]•[dR](T)[sP]•[dR](T)[sP]•[dR](A)[sP]•[dR](C)[sP]• |
| | [dR](A)[sP]•[dR](T)[sP]•[dR](C)[sP]•[LR](T)[sP]•[dR](T)[sP]•[LR]([5meC])[sP]• |
| | [LR]([5meC]) |
| 1122_277 | [LR](A)[sP]•[LR](A)[sP]•[dR](T)[sP]•[LR]([5meC])[sP]•[dR](T)[sP]•[dR](T)[sP]• |
| | [MOE](A)[sP]•[dR](T)[sP]•[dR](T)[sP]•[dR](T)[sP]•[dR](A)[sP]•[dR](C)[sP]• |
| | [dR](A)[sP]•[dR](T)[sP]•[dR](C)[sP]•[LR](T)[sP]•[dR](T)[sP]•[LR]([5meC])[sP]• |
| | [LR]([5meC]) |
| 1122_278 | [LR](A)[sP]•[LR](A)[sP]•[dR](T)[sP]•[LR]([5meC])[sP]•[dR](T)[sP]•[MOE](T)[sP]• |
| | [LR](A)[sP]•[dR](T)[sP]•[dR](T)[sP]•[dR](T)[sP]•[dR](A)[sP]•[dR](C)[sP]• |
| | [dR](A)[sP]•[dR](T)[sP]•[dR](C)[sP]•[LR](T)[sP]•[dR](T)[sP]•[LR]([5meC])[sP]• |
| | [LR]([5meC]) |
| 1122_279 | [LR](A)[sP]•[LR](A)[sP]•[dR](T)[sP]•[LR]([5meC])[sP]•[MOE](T)[sP]•[dR](T)[sP]• |
| | [LR](A)[sP]•[dR](T)[sP]•[dR](T)[sP]•[dR](T)[sP]•[dR](A)[sP]•[dR](C)[sP]• |
| | [dR](A)[sP]•[dR](T)[sP]•[dR](C)[sP]•[LR](T)[sP]•[dR](T)[sP]•[LR]([5meC])[sP]• |
| | [LR]([5meC]) |
| 1122_280 | [LR](A)[sP]•[LR](A)[sP]•[dR](T)[sP]•[MOE]([5meC])[sP]•[dR](T)[sP]•[dR](T)[sP]• |
| | [LR](A)[sP]•[dR](T)[sP]•[dR](T)[sP]•[dR](T)[sP]•[dR](A)[sP]•[dR](C)[sP]• |
| | [dR](A)[sP]•[dR](T)[sP]•[dR](C)[sP]•[LR](T)[sP]•[dR](T)[sP]•[LR]([5meC])[sP]• |
| | [LR]([5meC]) |
| 1122_281 | [LR](A)[sP]•[LR](A)[sP]•[MOE](T)[sP]•[LR]([5meC])[sP]•[dR](T)[sP]•[dR](T)[sP]• |
| | [LR](A)[sP]•[dR](T)[sP]•[dR](T)[sP]•[dR](T)[sP]•[dR](A)[sP]•[dR](C)[sP]• |
| | [dR](A)[sP]•[dR](T)[sP]•[dR](C)[sP]•[LR](T)[sP]•[dR](T)[sP]•[LR]([5meC])[sP]• |
| | [LR]([5meC]) |
| 1122_282 | [LR](A)[sP]•[MOE](A)[sP]•[dR](T)[sP]•[LR]([5meC])[sP]•[dR](T)[sP]•[dR](T)[sP]• |
| | [LR](A)[sP]•[dR](T)[sP]•[dR](T)[sP]•[dR](T)[sP]•[dR](A)[sP]•[dR](C)[sP]• |
| | [dR](A)[sP]•[dR](T)[sP]•[dR](C)[sP]•[LR](T)[sP]•[dR](T)[sP]•[LR]([5meC])[sP]• |
| | [LR]([5meC]) |
| 1122_283 | [LR](A)[sP]•[LR](A)[sP]•[dR](T)[sP]•[LR]([5meC])[sP]•[dR](T)[sP]•[dR](T)[sP]• |
| | [LR](A)[sP]•[dR](T)[sP]•[dR](T)[sP]•[dR](T)[sP]•[dR](A)[sP]•[dR](C)[sP]• |
| | [dR](A)[sP]•[dR](T)[sP]•[mR](C)[sP]•[LR](T)[sP]•[dR](T)[sP]•[LR]([5meC])[sP]• |
| | [LR]([5meC]) |
| 1122_284 | [LR](A)[sP]•[LR](A)[sP]•[dR](T)[sP]•[LR]([5meC])[sP]•[dR](T)[sP]•[dR](T)[sP]• |
| | [LR](A)[sP]•[dR](T)[sP]•[dR](T)[sP]•[dR](T)[sP]•[dR](A)[sP]•[dR](C)[sP]• |
| | [mR](A)[sP]•[dR](T)[sP]•[dR](C)[sP]•[LR](T)[sP]•[dR](T)[sP]•[LR]([5meC])[sP]• |
| | [LR]([5meC]) |
| 1122_285 | [LR](A)[sP]•[LR](A)[sP]•[dR](T)[sP]•[LR]([5meC])[sP]•[dR](T)[sP]•[dR](T)[sP]• |
| | [LR](A)[sP]•[dR](T)[sP]•[dR](T)[sP]•[dR](T)[sP]•[dR](A)[sP]•[mR](C)[sP]• |
| | [dR](A)[sP]•[dR](T)[sP]•[dR](C)[sP]•[LR](T)[sP]•[dR](T)[sP]•[LR]([5meC])[sP]• |
| | [LR]([5meC]) |
| 1122_286 | [LR](A)[sP]•[LR](A)[sP]•[dR](T)[sP]•[LR]([5meC])[sP]•[dR](T)[sP]•[dR](T)[sP]• |
| | [LR](A)[sP]•[dR](T)[sP]•[dR](T)[sP]•[dR](T)[sP]•[mR](A)[sP]•[dR](C)[sP]• |
| | [dR](A)[sP]•[dR](T)[sP]•[dR](C)[sP]•[LR](T)[sP]•[dR](T)[sP]•[LR]([5meC])[sP]• |
| | [LR]([5meC]) |
| 1122_287 | [LR](A)[sP]•[LR](A)[sP]•[dR](T)[sP]•[LR]([5meC])[sP]•[dR](T)[sP]•[dR](T)[sP]• |
| | [mR](A)[sP]•[dR](T)[sP]•[dR](T)[sP]•[dR](T)[sP]•[dR](A)[sP]•[dR](C)[sP]• |
| | [dR](A)[sP]•[dR](T)[sP]•[dR](C)[sP]•[LR](T)[sP]•[dR](T)[sP]•[LR]([5meC])[sP]• |
| | [LR]([5meC]) |
| 1122_288 | [LR](A)[sP]•[mR](A)[sP]•[dR](T)[sP]•[LR]([5meC])[sP]•[dR](T)[sP]•[dR](T)[sP]• |
| | [LR](A)[sP]•[dR](T)[sP]•[dR](T)[sP]•[dR](T)[sP]•[dR](A)[sP]•[dR](C)[sP]• |
| | [dR](A)[sP]•[dR](T)[sP]•[dR](C)[sP]•[LR](T)[sP]•[dR](T)[sP]•[LR]([5meC])[sP]• |
| | [LR]([5meC]) |
| 1122_289 | [LR](A)[sP]•[LR](A)[sP]•[LR](T)[sP]•[fR](C)[sP]•[dR](T)[sP]•[dR](T)[sP]• |
| | [dR](A)[sP]•[dR](T)[sP]•[dR](T)[sP]•[dR](T)[sP]•[dR](A)[sP]•[dR](C)[sP]• |
| | [dR](A)[sP]•[dR](T)[sP]•[dR](C)[sP]•[LR](T)[sP]•[dR](T)[sP]•[LR]([5meC])[sP]• |
| | [LR]([5meC]) |
| 1122_290 | [LR](A)[sP]•[LR](A)[sP]•[LR](T)[sP]•[LR]([5meC])[sP]•[dR](T)[sP]•[dR](T)[sP]• |
| | [dR](A)[sP]•[dR](T)[sP]•[dR](T)[sP]•[dR](T)[sP]•[dR](A)[sP]•[dR](C)[sP]• |
| | [dR](A)[sP]•[dR](T)[sP]•[dR](C)[sP]•[LR](T)[sP]•[dR](T)[sP]•[fR](C)[sP]• |
| | [LR]([5meC]) |
| 1122_291 | [LR](A)[sP]•[LR](A)[sP]•[LR](T)[sP]•[LR]([5meC])[sP]•[dR](T)[sP]•[dR](T)[sP]• |
| | [dR](A)[sP]•[dR](T)[sP]•[dR](T)[sP]•[dR](T)[sP]•[dR](A)[sP]•[dR](C)[sP]• |
| | [dR](A)[sP]•[dR](T)[sP]•[dR](C)[sP]•[LR](T)[sP]•[dR](T)[sP]•[mR](C)[sP]• |
| | [LR]([5meC]) |
| 1122_292 | [LR](A)[sP]•[LR](A)[sP]•[LR](T)[sP]•[mR](C)[sP]•[dR](T)[sP]•[dR](T)[sP]• |
| | [dR](A)[sP]•[dR](T)[sP]•[dR](T)[sP]•[dR](T)[sP]•[dR](A)[sP]•[dR](C)[sP]• |
| | [dR](A)[sP]•[dR](T)[sP]•[dR](C)[sP]•[LR](T)[sP]•[dR](T)[sP]•[LR]([5meC])[sP]• |
| | [LR]([5meC]) |
| 1122_293 | [LR](A)[sP]•[dR](A)[sP]•[dR](T)[sP]•[fR](C)[sP]•[dR](T)[sP]•[LR](T)[sP]• |
| | [dR](A)[sP]•[dR](T)[sP]•[dR](T)[sP]•[dR](T)[sP]•[dR](A)[sP]•[dR](C)[sP]• |
| | [dR](A)[sP]•[dR](T)[sP]•[dR](C)[sP]•[dR](T)[sP]•[LR](T)[sP]•[LR]([5meC])[sP]• |
| | [LR]([5meC]) |
| 1122_294 | [LR](A)[sP]•[dR](A)[sP]•[dR](T)[sP]•[LR]([5meC])[sP]•[dR](T)[sP]•[LR](T)[sP]• |
| | [dR](A)[sP]•[dR](T)[sP]•[dR](T)[sP]•[dR](T)[sP]•[dR](A)[sP]•[dR](C)[sP]• |
| | [dR](A)[sP]•[dR](T)[sP]•[dR](C)[sP]•[dR](T)[sP]•[LR](T)[sP]•[fR](C)[sP]• |
| | [LR]([5meC]) |
| 1122_295 | [LR](A)[sP]•[dR](A)[sP]•[dR](T)[sP]•[LR]([5meC])[sP]•[dR](T)[sP]•[LR](T)[sP]• |
| | [dR](A)[sP]•[dR](T)[sP]•[dR](T)[sP]•[dR](T)[sP]•[dR](A)[sP]•[dR](C)[sP]• |
| | [dR](A)[sP]•[dR](T)[sP]•[dR](C)[sP]•[dR](T)[sP]•[LR](T)[sP]•[mR](C)[sP]• |
| | [LR]([5meC]) |
| 1122_296 | [LR](A)[sP]•[dR](A)[sP]•[dR](T)[sP]•[mR](C)[sP]•[dR](T)[sP]•[LR](T)[sP]• |
| | [dR](A)[sP]•[dR](T)[sP]•[dR](T)[sP]•[dR](T)[sP]•[dR](A)[sP]•[dR](C)[sP]• |
| | [dR](A)[sP]•[dR](T)[sP]•[dR](C)[sP]•[dR](T)[sP]•[LR](T)[sP]•[LR]([5meC])[sP]• |
| | [LR]([5meC]) |
| 1122_297 | [LR](A)[sP]•[LR](A)[sP]•[dR](T)[sP]•[fR](C)[sP]•[dR](T)[sP]•[dR](T)[sP]• |
| | [LR](A)[sP]•[dR](T)[sP]•[dR](T)[sP]•[dR](T)[sP]•[dR](A)[sP]•[dR](C)[sP]• |
| | [dR](A)[sP]•[dR](T)[sP]•[dR](C)[sP]•[LR](T)[sP]•[dR](T)[sP]•[LR]([5meC])[sP]• |
| | [LR]([5meC]) |
| 1122_298 | [LR](A)[sP]•[LR](A)[sP]•[dR](T)[sP]•[LR]([5meC])[sP]•[dR](T)[sP]•[dR](T)[sP]• |
| | [LR](A)[sP]•[dR](T)[sP]•[dR](T)[sP]•[dR](T)[sP]•[dR](A)[sP]•[dR](C)[sP]• |
| | [dR](A)[sP]•[dR](T)[sP]•[dR](C)[sP]•[LR](T)[sP]•[dR](T)[sP]•[fR](C)[sP]• |
| | [LR]([5meC]) |
| 1122_299 | [LR](A)[sP]•[LR](A)[sP]•[dR](T)[sP]•[LR]([5meC])[sP]•[dR](T)[sP]•[dR](T)[sP]• |
| | [LR](A)[sP]•[dR](T)[sP]•[dR](T)[sP]•[dR](T)[sP]•[dR](A)[sP]•[dR](C)[sP]• |
| | [dR](A)[sP]•[dR](T)[sP]•[dR](C)[sP]•[LR](T)[sP]•[dR](T)[sP]•[mR](C)[sP]• |
| | [LR]([5meC]) |
| 1122_300 | [LR](A)[sP]•[LR](A)[sP]•[dR](T)[sP]•[mR](C)[sP]•[dR](T)[sP]•[dR](T)[sP]• |
| | [LR](A)[sP]•[dR](T)[sP]•[dR](T)[sP]•[dR](T)[sP]•[dR](A)[sP]•[dR](C)[sP]• |
| | [dR](A)[sP]•[dR](T)[sP]•[dR](C)[sP]•[LR](T)[sP]•[dR](T)[sP]•[LR]([5meC])[sP]• |
| | [LR]([5meC]) |
| 1122_301 | [LR](A)[sP]•[dR](A)[sP]•[dR](T)[sP]•[LR]([5meC])[sP]•[dR](T)[sP]•[LR](T)[sP]• |
| | [dR](A)[sP]•[dR](T)[sP]•[dR](T)[sP]•[dR](T)[sP]•[dR](A)[sP]•[fR](C)[sP]• |
| | [dR](A)[sP]•[dR](T)[sP]•[dR](C)[sP]•[dR](T)[sP]•[LR](T)[sP]•[LR]([5meC])[sP]• |
| | [LR]([5meC]) |
| 1122_302 | [LR](A)[sP]•[dR](A)[sP]•[dR](T)[sP]•[LR]([5meC])[sP]•[dR](T)[sP]•[LR](T)[sP]• |
| | [dR](A)[sP]•[dR](T)[sP]•[dR](T)[sP]•[dR](T)[sP]•[fR](A)[sP]•[dR](C)[sP]• |
| | [dR](A)[sP]•[dR](T)[sP]•[dR](C)[sP]•[dR](T)[sP]•[LR](T)[sP]•[LR]([5meC])[sP]• |
| | [LR]([5meC]) |
| 1122_303 | [LR](A)[sP]•[dR](A)[sP]•[dR](T)[sP]•[LR]([5meC])[sP]•[dR](T)[sP]•[LR](T)[sP]• |
| | [fR](A)[sP]•[dR](T)[sP]•[dR](T)[sP]•[dR](T)[sP]•[dR](A)[sP]•[dR](C)[sP]• |
| | [dR](A)[sP]•[dR](T)[sP]•[dR](C)[sP]•[dR](T)[sP]•[LR](T)[sP]•[LR]([5meC])[sP]• |
| | [LR]([5meC]) |
| 1122_304 | [LR](A)[sP]•[dR](A)[sP]•[dR](T)[sP]•[LR]([5meC])[sP]•[dR](T)[sP]•[LR](T)[sP]• |
| | [dR](A)[sP]•[dR](T)[sP]•[dR](T)[sP]•[dR](T)[sP]•[dR](A)[sP]•[dR](C)[sP]• |
| | [dR](A)[sP]•[dR](T)[sP]•[dR](C)[sP]•[LR](T)[sP]•[LR](T)[sP]•[LR]([5meC])[sP]• |
| | [LR]([5meC]) |
| 1122_305 | [LR](A)[sP]•[dR](A)[sP]•[dR](T)[sP]•[LR]([5meC])[sP]•[dR](T)[sP]•[LR](T)[sP]• |
| | [dR](A)[sP]•[dR](T)[sP]•[dR](T)[sP]•[dR](T)[sP]•[dR](A)[sP]•[dR](C)[sP]• |
| | [dR](A)[sP]•[LR](T)[sP]•[dR](C)[sP]•[dR](T)[sP]•[LR](T)[sP]•[LR]([5meC])[sP]• |
| | [LR]([5meC]) |
| 1122_306 | [LR](A)[sP]•[dR](A)[sP]•[dR](T)[sP]•[LR]([5meC])[sP]•[dR](T)[sP]•[LR](T)[sP]• |
| | [dR](A)[sP]•[dR](T)[sP]•[dR](T)[sP]•[dR](T)[sP]•[dR](A)[sP]•[dR](C)[sP]• |
| | [LR](A)[sP]•[dR](T)[sP]•[dR](C)[sP]•[dR](T)[sP]•[LR](T)[sP]•[LR]([5meC])[sP]• |
| | [LR]([5meC]) |
| 1122_307 | [LR](A)[sP]•[dR](A)[sP]•[dR](T)[sP]•[LR]([5meC])[sP]•[dR](T)[sP]•[LR](T)[sP]• |
| | [dR](A)[sP]•[dR](T)[sP]•[dR](T)[sP]•[dR](T)[sP]•[LR](A)[sP]•[dR](C)[sP]• |
| | [dR](A)[sP]•[dR](T)[sP]•[dR](C)[sP]•[dR](T)[sP]•[LR](T)[sP]•[LR]([5meC])[sP]• |
| | [LR]([5meC]) |
| 1122_308 | [LR](A)[sP]•[fR](A)[sP]•[fR](U)[sP]•[LR]([5meC])[sP]•[dR](T)[sP]•[LR](T)[sP]• |
| | [dR](A)[sP]•[dR](T)[sP]•[dR](T)[sP]•[dR](T)[sP]•[dR](A)[sP]•[dR](C)[sP]• |
| | [dR](A)[sP]•[dR](T)[sP]•[dR](C)[sP]•[LR](T)[sP]•[dR](T)[sP]•[LR]([5meC])[sP]• |
| | [LR]([5meC]) |
| 1122_309 | [LR](A)[sP]•[LR](A)[sP]•[fR](U)[sP]•[LR]([5meC])[sP]•[dR](T)[sP]•[dR](T)[sP]• |
| | [dR](A)[sP]•[dR](T)[sP]•[dR](T)[sP]•[dR](T)[sP]•[dR](A)[sP]•[dR](C)[sP]• |
| | [dR](A)[sP]•[dR](T)[sP]•[dR](C)[sP]•[LR](T)[sP]•[dR](T)[sP]•[LR]([5meC])[sP]• |
| | [LR]([5meC]) |
| 1122_310 | [LR](A)[sP]•[LR](A)[sP]•[LR](T)[sP]•[LR]([5meC])[sP]•[dR](T)[sP]•[dR](T)[sP]• |
| | [dR](A)[sP]•[dR](T)[sP]•[dR](T)[sP]•[dR](T)[sP]•[dR](A)[sP]•[dR](C)[sP]• |
| | [dR](A)[sP]•[dR](T)[sP]•[dR](C)[sP]•[fR](U)[sP]•[dR](T)[sP]•[LR]([5meC])[sP]• |
| | [LR]([5meC]) |
| 1122_311 | [LR](A)[sP]•[LR](A)[sP]•[LR](T)[sP]•[LR]([5meC])[sP]•[dR](T)[sP]•[dR](T)[sP]• |
| | [dR](A)[sP]•[dR](T)[sP]•[dR](T)[sP]•[dR](T)[sP]•[dR](A)[sP]•[dR](C)[sP]• |
| | [dR](A)[sP]•[dR](T)[sP]•[dR](C)[sP]•[LR](T)[sP]•[fR](U)[sP]•[LR]([5meC])[sP]• |
| | [LR]([5meC]) |
| 1122_312 | [LR](A)[sP]•[LR](A)[sP]•[LR](T)[sP]•[LR]([5meC])[sP]•[dR](T)[sP]•[dR](T)[sP]• |
| | [dR](A)[sP]•[dR](T)[sP]•[dR](T)[sP]•[fR](U)[sP]•[dR](A)[sP]•[dR](C)[sP]• |
| | [dR](A)[sP]•[dR](T)[sP]•[dR](C)[sP]•[LR](T)[sP]•[dR](T)[sP]•[LR]([5meC])[sP]• |
| | [LR]([5meC]) |
| 1122_313 | [LR](A)[sP]•[LR](A)[sP]•[LR](T)[sP]•[LR]([5meC])[sP]•[dR](T)[sP]•[dR](T)[sP]• |
| | [dR](A)[sP]•[dR](T)[sP]•[fR](U)[sP]•[dR](T)[sP]•[dR](A)[sP]•[dR](C)[sP]• |
| | [dR](A)[sP]•[dR](T)[sP]•[dR](C)[sP]•[LR](T)[sP]•[dR](T)[sP]•[LR]([5meC])[sP]• |
| | [LR]([5meC]) |
| 1122_314 | [LR](A)[sP]•[LR](A)[sP]•[LR](T)[sP]•[LR]([5meC])[sP]•[dR](T)[sP]•[dR](T)[sP]• |
| | [dR](A)[sP]•[fR](U)[sP]•[dR](T)[sP]•[dR](T)[sP]•[dR](A)[sP]•[dR](C)[sP]• |
| | [dR](A)[sP]•[dR](T)[sP]•[dR](C)[sP]•[LR](T)[sP]•[dR](T)[sP]•[LR]([5meC])[sP]• |
| | [LR]([5meC]) |
| 1122_315 | [LR](A)[sP]•[LR](A)[sP]•[LR](T)[sP]•[LR]([5meC])[sP]•[dR](T)[sP]•[fR](U)[sP]• |
| | [dR](A)[sP]•[dR](T)[sP]•[dR](T)[sP]•[dR](T)[sP]•[dR](A)[sP]•[dR](C)[sP]• |
| | [dR](A)[sP]•[dR](T)[sP]•[dR](C)[sP]•[LR](T)[sP]•[dR](T)[sP]•[LR]([5meC])[sP]• |
| | [LR]([5meC]) |
| 1122_316 | [LR](A)[sP]•[fR](A)[sP]•[fR](U)[sP]•[LR]([5meC])[sP]•[dR](T)[sP]•[LR](T)[sP]• |
| | [dR](A)[sP]•[dR](T)[sP]•[dR](T)[sP]•[dR](T)[sP]•[dR](A)[sP]•[dR](C)[sP]• |
| | [dR](A)[sP]•[dR](T)[sP]•[dR](C)[sP]•[dR](T)[sP]•[LR](T)[sP]•[LR]([5meC])[sP]• |
| | [LR]([5meC]) |
| 1122_317 | [LR](A)[sP]•[dR](A)[sP]•[dR](T)[sP]•[LR]([5meC])[sP]•[dR](T)[sP]•[fR](U)[sP]• |
| | [dR](A)[sP]•[dR](T)[sP]•[dR](T)[sP]•[dR](T)[sP]•[dR](A)[sP]•[dR](C)[sP]• |
| | [dR](A)[sP]•[dR](T)[sP]•[dR](C)[sP]•[dR](T)[sP]•[LR](T)[sP]•[LR]([5meC])[sP]• |
| | [LR]([5meC]) |
| 1122_318 | [LR](A)[sP]•[dR](A)[sP]•[dR](T)[sP]•[LR]([5meC])[sP]•[dR](T)[sP]•[LR](T)[sP]• |
| | [dR](A)[sP]•[dR](T)[sP]•[dR](T)[sP]•[dR](T)[sP]•[dR](A)[sP]•[dR](C)[sP]• |
| | [dR](A)[sP]•[dR](T)[sP]•[dR](C)[sP]•[dR](T)[sP]•[fR](U)[sP]•[LR]([5meC])[sP]• |
| | [LR]([5meC]) |
| 1122_319 | [LR](A)[sP]•[dR](A)[sP]•[dR](T)[sP]•[LR]([5meC])[sP]•[dR](T)[sP]•[LR](T)[sP]• |
| | [dR](A)[sP]•[dR](T)[sP]•[dR](T)[sP]•[dR](T)[sP]•[dR](A)[sP]•[dR](C)[sP]• |
| | [dR](A)[sP]•[dR](T)[sP]•[dR](C)[sP]•[fR](U)[sP]•[LR](T)[sP]•[LR]([5meC])[sP]• |
| | [LR]([5meC]) |
| 1122_320 | [LR](A)[sP]•[dR](A)[sP]•[dR](T)[sP]•[LR]([5meC])[sP]•[dR](T)[sP]•[LR](T)[sP]• |
| | [dR](A)[sP]•[dR](T)[sP]•[dR[(T)[sP]•[dR[(T)[sP]•[dR](A)[sP]•[dR](C)[sP]• |
| | [dR](A)[sP]•[fR](U)[sP]•[dR](C)[sP]•[dR](T)[sP]•[LR](T)[sP]•[LR]([5meC])[sP]• |
| | [LR]([5meC]) |
| 1122_321 | [LR](A)[sP]•[dR](A)[sP]•[dR](T)[sP]•[LR]([5meC])[sP]•[dR](T)[sP]•[LR](T)[sP]• |
| | [dR](A)[sP]•[dR](T)[sP]•[dR](T)[sP]•[fR](U)[sP]•[dR](A)[sP]•[dR](C)[sP]• |
| | [dR](A)[sP]•[dR](T)[sP]•[dR](C)[sP]•[dR](T)[sP]•[LR](T)[sP]•[LR]([5meC])[sP]• |
| | [LR]([5meC]) |
| 1122_322 | [LR](A)[sP]•[dR](A)[sP]•[dR](T)[sP]•[LR]([5meC])[sP]•[dR](T)[sP]•[LR](T)[sP]• |
| | [dR](A)[sP]•[dR](T)[sP]•[fR](U)[sP]•[dR](T)[sP]•[dR](A)[sP]•[dR](C)[sP]• |
| | [dR](A)[sP]•[dR](T)[sP]•[dR](C)[sP]•[dR](T)[sP]•[LR](T)[sP]•[LR]([5meC])[sP]• |
| | [LR]([5meC]) |
| 1122_323 | [LR](A)[sP]•[dR](A)[sP]•[dR](T)[sP]•[LR]([5meC])[sP]•[dR](T)[sP]•[LR](T)[sP]• |
| | [dR](A)[sP]•[fR](U)[sP]•[dR](T)[sP]•[dR](T)[sP]•[dR](A)[sP]•[dR](C)[sP]• |
| | [dR](A)[sP]•[dR](T)[sP]•[dR](C)[sP]•[dR](T)[sP]•[LR](T)[sP]•[LR]([5meC])[sP]• |
| | [LR]([5meC]) |
| 1122_324 | [LR](A)[sP]•[dR](A)[sP]•[dR](T)[sP]•[LR]([5meC])[sP]•[fR](U)[sP]•[LR](T)[sP]• |
| | [dR](A)[sP]•[dR](T)[sP]•[dR](T)[sP]•[dR](T)[sP]•[dR](A)[sP]•[dR](C)[sP]• |
| | [dR](A)[sP]•[dR](T)[sP]•[dR](C)[sP]•[dR](T)[sP]•[LR](T)[sP]•[LR]([5meC])[sP]• |
| | [LR]([5meC]) |
| 1122_325 | [LR](A)[sP]•[dR](A)[sP]•[fR](U)[sP]•[LR]([5meC])[sP]•[dR](T)[sP]•[LR](T)[sP]• |
| | [dR](A)[sP]•[dR](T)[sP]•[dR](T)[sP]•[dR](T)[sP]•[dR](A)[sP]•[dR](C)[sP]• |
| | [dR](A)[sP]•[dR](T)[sP]•[dR](C)[sP]•[dR](T)[sP]•[LR](T)[sP]•[LR]([5meC])[sP]• |
| | [LR]([5meC]) |
| 1122_326 | [LR](A)[sP]•[LR](A)[sP]•[dR](T)[sP]•[LR]([5meC])[sP]•[dR](T)[sP]•[dR](T)[sP]• |
| | [LR](A)[sP]•[dR](T)[sP]•[dR](T)[sP]•[dR](T)[sP]•[dR](A)[sP]•[dR](C)[sP]• |
| | [dR](A)[sP]•[dR](T)[sP]•[dR](C)[sP]•[fR](U)[sP]•[dR](T)[sP]•[LR]([5meC])[sP]• |
| | [LR]([5meC]) |
| 1122_327 | [LR](A)[sP]•[LR](A)[sP]•[dR](T)[sP]•[LR]([5meC])[sP]•[dR](T)[sP]•[dR](T)[sP]• |
| | [LR](A)[sP]•[dR](T)[sP]•[dR](T)[sP]•[dR](T)[sP]•[dR](A)[sP]•[dR](C)[sP]• |
| | [dR](A)[sP]•[dR](T)[sP]•[dR](C)[sP]•[LR](T)[sP]•[fR](U)[sP]•[LR]([5meC])[sP]• |
| | [LR]([5meC]) |
| 1122_328 | [LR](A)[sP]•[LR](A)[sP]•[dR](T)[sP]•[LR]([5meC])[sP]•[dR](T)[sP]•[dR](T)[sP]• |
| | [LR](A)[sP]•[dR](T)[sP]•[dR](T)[sP]•[dR](T)[sP]•[dR](A)[sP]•[dR](C)[sP]• |
| | [dR](A)[sP]•[fR](U)[sP]•[dR](C)[sP]•[LR](T)[sP]•[dR](T)[sP]•[LR]([5meC])[sP]• |
| | [LR]([5meC]) |
| 1122_329 | [LR](A)[sP]•[LR](A)[sP]•[dR](T)[sP]•[LR]([5meC])[sP]•[dR](T)[sP]•[dR](T)[sP]• |
| | [LR](A)[sP]•[dR](T)[sP]•[dR](T)[sP]•[fR](U)[sP]•[dR](A)[sP]•[dR](C)[sP]• |
| | [dR](A)[sP]•[dR](T)[sP]•[dR](C)[sP]•[LR](T)[sP]•[dR](T)[sP]•[LR]([5meC])[sP]• |
| | [LR]([5meC]) |
| 1122_330 | [LR](A)[sP]•[LR](A)[sP]•[dR](T)[sP]•[LR]([5meC])[sP]•[dR](T)[sP]•[dR](T)[sP]• |
| | [LR](A)[sP]•[dR](T)[sP]•[fR](U)[sP]•[dR](T)[sP]•[dR](A)[sP]•[dR](C)[sP]• |
| | [dR](A)[sP]•[dR](T)[sP]•[dR](C)[sP]•[LR](T)[sP]•[dR](T)[sP]•[LR]([5meC])[sP]• |
| | [LR]([5meC]) |
| 1122_331 | [LR](A)[sP]•[LR](A)[sP]•[dR](T)[sP]•[LR]([5meC])[sP]•[dR](T)[sP]•[dR](T)[sP]• |
| | [LR](A)[sP]•[fR](U)[sP]•[dR](T)[sP]•[dR](T)[sP]•[dR](A)[sP]•[dR](C)[sP]• |
| | [dR](A)[sP]•[dR](T)[sP]•[dR](C)[sP]•[LR](T)[sP]•[dR](T)[sP]•[LR]([5meC])[sP]• |
| | [LR]([5meC]) |
| 1122_332 | [LR](A)[sP]•[LR](A)[sP]•[dR](T)[sP]•[LR]([5meC])[sP]•[dR](T)[sP]•[fR](U)[sP]• |
| | [LR](A)[sP]•[dR](T)[sP]•[dR](T)[sP]•[dR](T)[sP]•[dR](A)[sP]•[dR](C)[sP]• |
| | [dR](A)[sP]•[dR](T)[sP]•[dR](C)[sP]•[LR](T)[sP]•[dR](T)[sP]•[LR]([5meC])[sP]• |
| | [LR]([5meC]) |
| 1122_333 | [LR](A)[sP]•[LR](A)[sP]•[dR](T)[sP]•[LR]([5meC])[sP]•[fR](U)[sP]•[dR](T)[sP]• |
| | [LR](A)[sP]•[dR](T)[sP]•[dR](T)[sP]•[dR](T)[sP]•[dR](A)[sP]•[dR](C)[sP]• |
| | [dR](A)[sP]•[dR](T)[sP]•[dR](C)[sP]•[LR](T)[sP]•[dR](T)[sP]•[LR]([5meC])[sP]• |
| | [LR]([5meC]) |
| 1122_334 | [LR](A)[sP]•[LR](A)[sP]•[fR](U)[sP]•[LR]([5meC])[sP]•[dR](T)[sP]•[dR](T)[sP]• |
| | [LR](A)[sP]•[dR](T)[sP]•[dR](T)[sP]•[dR](T)[sP]•[dR](A)[sP]•[dR](C)[sP]• |
| | [dR](A)[sP]•[dR](T)[sP]•[dR](C)[sP]•[LR](T)[sP]•[dR](T)[sP]•[LR]([5meC])[sP]• |
| | [LR]([5meC]) |
| 1122_335 | [LR](A)[sP]•[LR](A)[sP]•[LR](T)[sP]•[LR]([5meC])[sP]•[fR](U)[sP]•[dR](T)[sP]• |
| | [dR](A)[sP]•[dR](T)[sP]•[dR](T)[sP]•[dR](T)[sP]•[dR](A)[sP]•[dR](C)[sP]• |
| | [dR](A)[sP]•[dR](T)[sP]•[dR](C)[sP]•[LR](T)[sP]•[dR](T)[sP]•[LR]([5meC])[sP]• |
| | [LR]([5meC]) |
| 1122_336 | [LR](A)[sP]•[LR](A)[sP]•[LR](T)[sP]•[LR]([5meC])[sP]•[dR](T)[sP]•[dR](T)[sP]• |
| | [dR](A)[sP]•[dR](T)[sP]•[dR](T)[sP]•[dR](T)[sP]•[dR](A)[sP]•[dR](C)[sP]• |
| | [dR](A)[sP]•[fR](U)[sP]•[dR](C)[sP]•[LR](T)[sP]•[dR](T)[sP]•[LR]([5meC])[sP]• |
| | [LR]([5meC]) |
| 1816_2 | [LR](G)[sP]•[LR](A)[sP]•[dR](A)[sP]•[dR](T)[sP]•[LR]([5meC])[sP]•[dR](T)[sP]• |
| | [LR](T)[sP]•[LR](A)[sP]•[dR](T)[sP]•[dR](T)[sP]•[dR](T)[sP]•[dR](A)[sP]• |
| | [LR]([5meC])[sP]•[dR](A)[sP]•[dR](T)[sP]•[LR]([5meC])[sP]•[LR](T)[sP]•[LR](T) |
| 1816_3 | [LR](G)[sP]•[LR](A)[sP]•[dR](A)[sP]•[dR](T)[sP]•[LR]([5meC])[sP]•[dR](T)[sP]• |
| | [LR](T)[sP]•[LR](A)[sP]•[dR](T)[sP]•[dR](T)[sP]•[dR](T)[sP]•[dR](A)[sP]• |
| | [MOE]([5meC])[sP]•[dR](A)[sP]•[dR](T)[sP]•[LR]([5meC])[sP]•[LR](T)[sP]•[LR](T) |
| 1816_4 | [LR](G)[sP]•[LR](A)[sP]•[dR](A)[sP]•[dR](T)[sP]•[LR]([5meC])[sP]•[dR](T)[sP]• |
| | [LR](T)[sP]•[LR](A)[sP]•[dR](T)[sP]•[dR](T)[sP]•[dR](T)[sP]•[dR](A)[sP]• |
| | [dR](C)[sP]•[dR](A)[sP]•[dR](T)[sP]•[LR]([5meC])[sP]•[mR](U)[sP]•[LR](T) |
| 1816_5 | [LR](G)[sP]•[LR](A)[sP]•[dR](A)[sP]•[dR](T)[sP]•[LR]([5meC])[sP]•[dR](T)[sP]• |
| | [LR](T)[sP]•[LR](A)[sP]•[dR](T)[sP]•[dR](T)[sP]•[dR](T)[sP]•[dR](A)[sP]• |
| | [dR](C)[sP]•[dR](A)[sP]•[mR](U)[sP]•[LR]([5meC])[sP]•[LR](T)[sP]•[LR](T) |
| 1816_6 | [LR](G)[sP]•[LR](A)[sP]•[dR](A)[sP]•[dR](T)[sP]•[LR]([5meC])[sP]•[dR](T)[sP]• |
| | [LR](T)[sP]•[LR](A)[sP]•[dR](T)[sP]•[dR](T)[sP]•[mR](U)[sP]•[dR](A)[sP]• |
| | [dR](C)[sP]•[dR](A)[sP]•[dR](T)[sP]•[LR]([5meC])[sP]•[LR](T)[sP]•[LR](T) |
| 1816_7 | [LR](G)[sP]•[LR](A)[sP]•[dR](A)[sP]•[dR](T)[sP]•[LR]([5meC])[sP]•[dR](T)[sP]• |
| | [LR](T)[sP]•[LR](A)[sP]•[dR](T)[sP]•[mR](U)[sP]•[dR](T)[sP]•[dR](A)[sP]• |
| | [dR](C)[sP]•[dR](A)[sP]•[dR](T)[sP]•[LR]([5meC])[sP]•[LR](T)[sP]•[LR](T) |
| 1816_8 | [LR](G)[sP]•[LR](A)[sP]•[dR](A)[sP]•[dR](T)[sP]•[LR]([5meC])[sP]•[dR](T)[sP]• |
| | [LR](T)[sP]•[LR](A)[sP]•[mR](U)[sP]•[dR](T)[sP]•[dR](T)[sP]•[dR](A)[sP]• |
| | [dR](C)[sP]•[dR](A)[sP]•[dR](T)[sP]•[LR]([5meC])[sP]•[LR](T)[sP]•[LR](T) |
| 1816_9 | [LR](G)[sP]•[LR](A)[sP]•[dR](A)[sP]•[dR](T)[sP]•[LR]([5meC])[sP]•[dR](T)[sP]• |
| | [mR](U)[sP]•[LR](A)[sP]•[dR](T)[sP]•[dR](T)[sP]•[dR](T)[sP]•[dR](A)[sP]• |
| | [dR](C)[sP]•[dR](A)[sP]•[dR](T)[sP]•[LR]([5meC])[sP]•[LR](T)[sP]•[LR](T) |
| 1816_10 | [LR](G)[sP]•[LR](A)[sP]•[dR](A)[sP]•[dR](T)[sP]•[LR]([5meC])[sP]•[mR](U)[sP]• |
| | [LR](T)[sP]•[LR](A)[sP]•[dR](T)[sP]•[dR](T)[sP]•[dR](T)[sP]•[dR](A)[sP]• |
| | [dR](C)[sP]•[dR](A)[sP]•[dR](T)[sP]•[LR]([5meC])[sP]•[LR](T)[sP]•[LR](T) |
| 1816_11 | [LR](G)[sP]•[LR](A)[sP]•[dR](A)[sP]•[mR](U)[sP]•[LR]([5meC])[sP]•[dR](T)[sP]• |
| | [LR](T)[sP]•[LR](A)[sP]•[dR](T)[sP]•[dR](T)[sP]•[dR](T)[sP]•[dR](A)[sP]• |
| | [dR](C)[sP]•[dR](A)[sP]•[dR](T)[sP]•[LR]([5meC])[sP]•[LR](T)[sP]•[LR](T) |
| 1816_12 | [LR](G)[sP]•[LR](A)[sP]•[dR](A)[sP]•[dR](T)[sP]•[LR]([5meC])[sP]•[dR](T)[sP]• |
| | [LR](T)[sP]•[LR](A)[sP]•[dR](T)[sP]•[dR](T)[sP]•[dR](T)[sP]•[dR](A)[sP]• |
| | [dR](C)[sP]•[dR](A)[sP]•[dR](T)[sP]•[LR]([5meC])[sP]•[LR](T)[sP]•[LR](T) |
| 1816_13 | [LR](G)[sP]•[LR](A)[sP]•[dR](A)[sP]•[dR](T)[sP]•[LR]([5meC])[sP]•[dR](T)[sP]• |
| | [LR](T)[sP]•[LR](A)[sP]•[dR](T)[sP]•[dR](T)[sP]•[dR](T)[sP]•[dR](A)[ssP]• |
| | [dR](C)[sP]•[dR](A)[sP]•[dR](T)[sP]•[LR]([5meC])[sP]•[LR](T)[sP]•[LR](T) |
| 1816_14 | [LR](G)[sP]•[LR](A)[sP]•[dR](A)[sP]•[dR](T)[sP]•[LR]([5meC])[sP]•[dR](T)[sP]• |
| | [LR](T)[sP]•[LR](A)[sP]•[dR](T)[sP]•[dR](T)[sP]•[dR](T)[sP]•[dR](A)[sP]• |
| | [dR](C)[ssP]•[dR](A)[sP]•[dR](T)[sP]•[LR]([5meC])[sP]•[LR](T)[sP]•[LR](T) |
| 1816_15 | [LR](G)[sP]•[LR](A)[sP]•[dR](A)[sP]•[dR](T)[sP]•[LR]([5meC])[sP]•[dR](T)[sP]• |
| | [LR](T)[sP]•[LR](A)[sP]•[dR](T)[sP]•[dR](T)[sP]•[dR](T)[sP]•[dR](A)[sP]• |
| | [dR](C)[sP]•[dR](A)[ssP]•[dR](T)[sP]•[LR]([5meC])[sP]•[LR](T)[sP]•[LR](T) |
| 1816_16 | [LR](G)[sP]•[LR](A)[sP]•[dR](A)[sP]•[dR](T)[sP]•[LR]([5meC])[sP]•[dR](T)[sP]• |
| | [LR](T)[sP]•[LR](A)[sP]•[dR](T)[sP]•[dR](T)[sP]•[dR](T)[sP]•[dR](A)[sP]• |
| | [dR](C)[sP]•[dR](A)[sP]•[dR](T)[ssP]•[LR]([5meC])[sP]•[LR](T)[sP]•[LR](T) |
| 1816_17 | [LR](G)[sP]•[LR](A)[sP]•[dR](A)[sP]•[dR](T)[sP]•[LR]([5meC])[sP]•[dR](T)[sP]• |
| | [LR](T)[sP]•[LR](A)[sP]•[dR](T)[sP]•[dR](T)[sP]•[dR](T)[sP]•[dR](A)[sP]• |
| | [dR](C)[sP]•[dR](A)[sP]•[dR](T)[sP]•[LR]([5meC])[ssP]•[LR](T)[sP]•[LR](T) |
| 1816_18 | [LR](G)[sP]•[LR](A)[sP]•[dR](A)[sP]•[dR](T)[sP]•[LR]([5meC])[sP]•[dR](T)[sP]• |
| | [LR](T)[sP]•[LR](A)[ssP]•[dR](T)[sP]•[dR](T)[sP]•[dR](T)[sP]•[dR](A)[sP]• |
| | [dR](C)[sP]•[dR](A)[sP]•[dR](T)[sP]•[LR]([5meC])[sP]•[LR](T)[sP]•[LR](T) |
| 1816_19 | [LR](G)[sP]•[LR](A)[sP]•[dR](A)[sP]•[dR](T)[sP]•[LR]([5meC])[sP]•[dR](T)[sP]• |
| | [LR](T)[sP]•[LR](A)[sP]•[dR](T)[ssP]•[dR](T)[sP]•[dR](T)[sP]•[dR](A)[sP]• |
| | [dR](C)[sP]•[dR](A)[sP]•[dR](T)[sP]•[LR]([5meC])[sP]•[LR](T)[sP]•[LR](T) |
| 1816_20 | [LR](G)[sP]•[LR](A)[sP]•[dR](A)[sP]•[dR](T)[sP]•[LR]([5meC])[sP]•[dR](T)[sP]• |
| | [LR](T)[sP]•[LR](A)[sP]•[dR](T)[sP]•[dR](T)[ssP]•[dR](T)[sP]•[dR](A)[sP]• |
| | [dR](C)[sP]•[dR](A)[sP]•[dR](T)[sP]•[LR]([5meC])[sP]•[LR](T)[sP]•[LR](T) |
| 1816_21 | [LR](G)[sP]•[LR](A)[sP]•[dR](A)[sP]•[dR](T)[sP]•[LR]([5meC])[sP]•[dR](T)[sP]• |
| | [LR](T)[sP]•[LR](A)[sP]•[dR](T)[sP]•[dR](T)[sP]•[dR](T)[ssP]•[dR](A)[sP]• |
| | [dR](C)[sP]•[dR](A)[sP]•[dR](T)[sP]•[LR]([5meC])[sP]•[LR](T)[sP]•[LR](T) |
| 1816_22 | [MOE](G)[sP]•[MOE](A)[sP]•[dR](A)[sP]•[dR](T)[sP]•[MOE]([5meC])[sP]•[dR](T)[sP]• |
| | [MOE](T)[sP]•[MOE](A)[sP]•[dR](T)[sP]•[dR](T)[sP]•[dR](T)[sP]•[dR](A)[sP]• |
| | [dR](C)[sP]•[dR](A)[sP]•[dR](T)[sP]•[MOE]([5meC])[sP]•[MOE](T)[sP]•[MOE](T) |
| 1816_23 | [MOE](G)[sP]•[LR](A)[sP]•[dR](A)[sP]•[dR](T)[sP]•[LR]([5meC])[sP]•[dR](T)[sP]• |
| | [LR](T)[sP]•[LR](A)[sP]•[dR](T)[sP]•[dR](T)[sP]•[dR](T)[sP]•[dR](A)[sP]• |
| | [dR](C)[sP]•[dR](A)[sP]•[dR](T)[sP]•[LR]([5meC])[sP]•[LR](T)[sP]•[MOE](T) |
| 1816_24 | [MOE](G)[sP]•[MOE](A)[sP]•[MOE](A)[sP]•[MOE](T)[sP]•[MOE]([5meC])[sP]• |
| | [MOE](T)[sP]•[MOE](T)[sP]•[dR](A)[sP]•[dR](T)[sP]•[dR](T)[sP]•[dR](T)[sP]• |
| | [dR](A)[sP]•[dR](C)[sP]•[dR](A)[sP]•[MOE](T)[sP]•[MOE]([5meC])[sP]•[MOE](T)[sP]• |
| | [MOE](T) |
| 1816_25 | [MOE](G)[sP]•[MOE](A)[sP]•[dR](A)[sP]•[dR](T)[sP]•[MOE]([5meC])[sP]•[dR](T)[sP]• |
| | [MOE](T)P•[MOE](A)[sP]•[dR](T)[sP]•[dR](T)[sP]•[dR](T)[sP]•[dR](A)[sP]• |
| | [dR](C)[sP]•[dR](A)[sP]•[dR](T)[sP]•[MOE]([5meC])[sP]•[MOE](T)[sP]•[MOE](T) |
| 1816_26 | [MOE](G)[sP]•[MOE](A)P•[MOE](A)P[MOE](T)P•[MOE]([5meC])P•[MOE](T)P•[MOE](T)[sP]• |
| | [dR](A)[sP]•[dR](T)[sP]•[dR](T)[sP]•[dR](T)[sP]•[dR](A)[sP]•[dR](C)[sP]• |
| | [dR](A)[sP]•[MOE](T)P•[MOE]([5meC])[sP]•[MOE](T)[sP]•[MOE](T) |
| 1816_27 | [LR](G)[sP]•[fR](A)[sP]•[dR](A)[sP]•[dR](T)[sP]•[LR]([5meC])[sP]•[dR](T)[sP]• |
| | [LR](T)[sP]•[LR](A)[sP]•[dR](T)[sP]•[dR](T)[sP]•[dR](T)[sP]•[dR](A)[sP]• |
| | [dR](C)[sP]•[dR](A)[sP]•[dR](T)[sP]•[LR]([5meC])[sP]•[LR](T)[sP]•[LR](T) |
| 1816_28 | [LR](G)[sP]•[LR](A)[sP]•[dR](A)[sP]•[dR](T)[sP]•[LR]([5meC])[sP]•[dR](T)[sP]• |
| | [LR](T)[sP]•[fR](A)[sP]•[dR](T)[sP]•[dR](T)[sP]•[dR](T)[sP]•[dR](A)[sP]• |
| | [dR](C)[sP]•[dR](A)[sP]•[dR](T)[sP]•[LR]([5meC])[sP]•[LR](T)[sP]•[LR](T) |
| 1816_29 | [LR](G)[sP]•[LR](A)[sP]•[dR](A)[sP]•[dR](T)[sP]•[LR]([5meC])[sP]•[dR](T)[sP]• |
| | [LR](T)[sP]•[LR](A)[sP]•[dR](T)[sP]•[dR](T)[sP]•[dR](T)[sP]•[dR](A)[sP]• |
| | [dR](C)[sP]•[fR](A)[sP]•[dR](T)[sP]•[LR]([5meC])[sP]•[LR](T)[sP]•[LR](T) |
| 1816_30 | [LR](G)[sP]•[LR](A)[sP]•[dR](A)[sP]•[dR](T)[sP]•[LR]([5meC])[sP]•[dR](T)[sP]• |
| | [LR](T)[sP]•[LR](A)[sP]•[dR](T)[sP]•[dR](T)[sP]•[dR](T)[sP]•[dR](A)[sP]• |
| | [fR](C)[sP]•[dR](A)[sP]•[dR](T)[sP]•[LR]([5meC])[sP]•[LR](T)[sP]•[LR](T) |
| 1816_31 | [LR](G)[sP]•[LR](A)[sP]•[dR](A)[sP]•[dR](T)[sP]•[LR]([5meC])[sP]•[dR](T)[sP]• |
| | [LR](T)[sP]•[LR](A)[sP]•[dR](T)[sP]•[dR](T)[sP]•[dR](T)[sP]•[fR](A)[sP]• |
| | [dR](C)[sP]•[dR](A)[sP]•[dR](T)[sP]•[LR]([5meC])[sP]•[LR](T)[sP]•[LR](T) |
| 1816_32 | [LR](G)[sP]•[LR](A)[sP]•[fR](A)[sP]•[dR](T)[sP]•[LR]([5meC])[sP]•[dR](T)[sP]• |
| | [LR](T)[sP]•[LR](A)[sP]•[dR](T)[sP]•[dR](T)[sP]•[dR](T)[sP]•[dR](A)[sP]• |
| | [dR](C)[sP]•[dR](A)[sP]•[dR](T)[sP]•[LR]([5meC])[sP]•[LR](T)[sP]•[LR](T) |
| 1816_33 | [LR](G)[sP]•[LR](A)[sP]•[dR](A)[sP]•[dR](T)[sP]•[LR]([5meC])[sP]•[dR](T)[sP]• |
| | [LR](T)[sP]•[LR](A)[sP]•[dR](T)[sP]•[dR](T)[sP]•[dR](T)[sP]•[dR](A)[sP]• |
| | [dR](C)[sP]•[dR](A)[sP]•[LR](T)[sP]•[LR]([5meC])[sP]•[LR](T)[sP]•[LR](T) |
| 1816_34 | [LR](G)[sP]•[LR](A)[sP]•[dR](A)[sP]•[dR](T)[sP]•[LR]([5meC])[sP]•[dR](T)[sP]• |
| | [LR](T)[sP]•[LR](A)[sP]•[dR](T)[sP]•[dR](T)[sP]•[dR](T)[sP]•[dR](A)[sP]• |
| | [dR](C)[sP]•[LR](A)[sP]•[dR](T)[sP]•[LR]([5meC])[sP]•[LR](T)[sP]•[LR](T) |
| 1816_35 | [LR](G)[sP]•[LR](A)[sP]•[dR](A)[sP]•[dR](T)[sP]•[LR]([5meC])[sP]•[dR](T)[sP]• |
| | [LR](T)[sP]•[LR](A)[sP]•[dR](T)[sP]•[dR](T)[sP]•[dR](T)[sP]•[LR](A)[sP]• |
| | [dR](C)[sP]•[dR](A)[sP]•[dR](T)[sP]•[LR]([5meC])[sP]•[LR](T)[sP]•[LR](T) |
| 1816_36 | [LR](G)[sP]•[LR](A)[sP]•[dR](A)[sP]•[dR](T)[sP]•[LR]([5meC])[sP]•[dR](T)[sP]• |
| | [LR](T)[sP]•[LR](A)[sP]•[dR](T)[sP]•[dR](T)[sP]•[LR](T)[sP]•[dR](A)[sP]• |
| | [dR](C)[sP]•[dR](A)[sP]•[dR](T)[sP]•[LR]([5meC])[sP]•[LR](T)[sP]•[LR](T) |
| 1816_37 | [LR](G)[sP]•[LR](A)[sP]•[dR](A)[sP]•[dR](T)[sP]•[LR]([5meC])[sP]•[dR](T)[sP]• |
| | [LR](T)[sP]•[LR](A)[sP]•[dR](T)[sP]•[LR](T)[sP]•[dR](T)[sP]•[dR](A)[sP]• |
| | [dR](C)[sP]•[dR](A)[sP]•[dR](T)[sP]•[LR]([5meC])[sP]•[LR](T)[sP]•[LR](T) |
| 1816_38 | [LR](G)[sP]•[LR](A)[sP]•[dR](A)[sP]•[dR](T)[sP]•[LR]([5meC])[sP]•[dR](T)[sP]• |
| | [LR](T)[sP]•[LR](A)[sP]•[LR](T)[sP]•[dR](T)[sP]•[dR](T)[sP]•[dR](A)[sP]• |
| | [dR](C)[sP]•[dR](A)[sP]•[dR](T)[sP]•[LR]([5meC])[sP]•[LR](T)[sP]•[LR](T) |
| 1816_39 | [LR](G)[sP]•[LR](A)[sP]•[dR](A)[sP]•[dR](T)[sP]•[LR]([5meC])[sP]•[LR](T)[sP]• |
| | [LR](T)[sP]•[LR](A)[sP]•[dR](T)[sP]•[dR](T)[sP]•[dR](T)[sP]•[dR](A)[sP]• |
| | [dR](C)[sP]•[dR](A)[sP]•[dR](T)[sP]•[LR]([5meC])[sP]•[LR](T)[sP]•[LR](T) |
| 1816_40 | [LR](G)[sP]•[LR](A)[sP]•[dR](A)[sP]•[LR](T)[sP]•[LR]([5meC])[sP]•[dR](T)[sP]• |
| | [LR](T)[sP]•[LR](A)[sP]•[dR](T)[sP]•[dR](T)[sP]•[dR](T)[sP]•[dR](A)[sP]• |
| | [dR](C)[sP]•[dR](A)[sP]•[dR](T)[sP]•[LR]([5meC])[sP]•[LR](T)[sP]•[LR](T) |
| 1816_41 | [LR](G)[sP]•[LR](A)[sP]•[LR](A)[sP]•[dR](T)[sP]•[LR]([5meC])[sP]•[dR](T)[sP]• |
| | [LR](T)[sP]•[LR](A)[sP]•[dR](T)[sP]•[dR](T)[sP]•[dR](T)[sP]•[dR](A)[sP]• |
| | [dR](C)[sP]•[dR](A)[sP]•[dR](T)[sP]•[LR]([5meC])[sP]•[LR](T)[sP]•[LR](T) |
| 1816_42 | [LR](G)[sP]•[LR](A)[sP]•[dR](A)[sP]•[dR](T)[sP]•[LR]([5meC])[sP]•[dR](T)[sP]• |
| | [LR](T)[sP]•[LR](A)[sP]•[dR](T)[sP]•[dR](T)[sP]•[dR](T)[sP]•[dR](A)[sP]• |
| | [dR](C)[sP]•[dR](A)[sP]•[dR](T)[sP]•[LR]([5meC])[sP]•[MOE](T)[sP]•[LR](T) |
| 1816_43 | [LR](G)[sP]•[LR](A)[sP]•[dR](A)[sP]•[dR](T)[sP]•[LR]([5meC])[sP]•[dR](T)[sP]• |
| | [LR](T)[sP]•[LR](A)[sP]•[dR](T)[sP]•[dR](T)[sP]•[dR](T)[sP]•[dR](A)[sP]• |
| | [dR](C)[sP]•[dR](A)[sP]•[dR](T)[sP]•[MOE]([5meC])[sP]•[LR](T)[sP]•[LR](T) |
| 1816_44 | [LR](G)[sP]•[LR](A)[sP]•[dR](A)[sP]•[dR](T)[sP]•[LR]([5meC])[sP]•[dR](T)[sP]• |
| | [LR](T)[sP]•[LR](A)[sP]•[dR](T)[sP]•[dR](T)[sP]•[dR](T)[sP]•[dR](A)[sP]• |
| | [dR](C)[sP]•[dR](A)[sP]•[MOE](T)[sP]•[LR]([5meC])[sP]•[LR](T)[sP]•[LR](T) |
| 1816_45 | [LR](G)[sP]•[LR](A)[sP]•[dR](A)[sP]•[dR](T)[sP]•[LR]([5meC])[sP]•[dR](T)[sP]• |
| | [LR](T)[sP]•[LR](A)[sP]•[dR](T)[sP]•[dR](T)[sP]•[dR](T)[sP]•[dR](A)[sP]• |
| | [dR](C)[sP]•[MOE](A)[sP]•[dR](T)[sP]•[LR]([5meC])[sP]•[LR](T)[sP]•[LR](T) |
| 1816_46 | [LR](G)[sP]•[LR](A)[sP]•[dR](A)[sP]•[dR](T)[sP]•[LR]([5meC])[sP]•[dR](T)[sP]• |
| | [LR](T)[sP]•[LR](A)[sP]•[dR](T)[sP]•[dR](T)[sP]•[dR](T)[sP]•[MOE](A)[sP]• |
| | [dR](C)[sP]•[dR](A)[sP]•[dR](T)[sP]•[LR]([5meC])[sP]•[LR](T)[sP]•[LR](T) |
| 1816_47 | [LR](G)[sP]•[LR](A)[sP]•[dR](A)[sP]•[dR](T)[sP]•[LR]([5meC])[sP]•[dR](T)[sP]• |
| | [LR](T)[sP]•[LR](A)[sP]•[dR](T)[sP]•[dR](T)[sP]•[MOE](T)[sP]•[dR](A)[sP]• |
| | [dR](C)[sP]•[dR](A)[sP]•[dR](T)[sP]•[LR]([5meC])[sP]•[LR](T)[sP]•[LR](T) |
| 1816_48 | [LR](G)[sP]•[LR](A)[sP]•[dR](A)[sP]•[dR](T)[sP]•[LR]([5meC])[sP]•[dR](T)[sP]• |
| | [LR](T)[sP]•[LR](A)[sP]•[dR](T)[sP]•[MOE](T)[sP]•[dR](T)[sP]•[dR](A)[sP]• |
| | [dR](C)[sP]•[dR](A)[sP]•[dR](T)[sP]•[LR]([5meC])[sP]•[LR](T)[sP]•[LR](T) |
| 1816_49 | [LR](G)[sP]•[LR](A)[sP]•[dR](A)[sP]•[dR](T)[sP]•[LR]([5meC])[sP]•[dR](T)[sP]• |
| | [LR](T)[sP]•[LR](A)[sP]•[MOE](T)[sP]•[dR](T)[sP]•[dR](T)[sP]•[dR](A)[sP]• |
| | [dR](C)[sP]•[dR](A)[sP]•[dR](T)[sP]•[LR]([5meC])[sP]•[LR](T)[sP]•[LR](T) |
| 1816_50 | [LR](G)[sP]•[LR](A)[sP]•[dR](A)[sP]•[dR](T)[sP]•[LR]([5meC])[sP]•[dR](T)[sP]• |
| | [LR](T)[sP]•[MOE](A)[sP]•[dR](T)[sP]•[dR](T)[sP]•[dR](T)[sP]•[dR](A)[sP]• |
| | [dR](C)[sP]•[dR](A)[sP]•[dR](T)[sP]•[LR]([5meC])[sP]•[LR](T)[sP]•[LR](T) |
| 1816_51 | [LR](G)[sP]•[LR](A)[sP]•[dR](A)[sP]•[dR](T)[sP]•[LR]([5meC])[sP]•[dR](T)[sP]• |
| | [MOE](T)[sP]•[LR](A)[sP]•[dR](T)[sP]•[dR](T)[sP]•[dR](T)[sP]•[dR](A)[sP]• |
| | [dR](C)[sP]•[dR](A)[sP]•[dR](T)[sP]•[LR]([5meC])[sP]•[LR](T)[sP]•[LR](T) |
| 1816_52 | [LR](G)[sP]•[LR](A)[sP]•[dR](A)[sP]•[dR](T)[sP]•[LR]([5meC])[sP]•[MOE](T)[sP]• |
| | [LR](T)[sP]•[LR](A)[sP]•[dR](T)[sP]•[dR](T)[sP]•[dR](T)[sP]•[dR](A)[sP]• |
| | [dR](C)[sP]•[dR](A)[sP]•[dR](T)[sP]•[LR]([5meC])[sP]•[LR](T)[sP]•[LR](T) |
| 1816_53 | [LR](G)[sP]•[LR](A)[sP]•[dR](A)[sP]•[dR](T)[sP]•[MOE]([5meC])[sP]•[dR](T)[sP]• |
| | [LR](T)[sP]•[LR](A)[sP]•[dR](T)[sP]•[dR](T)[sP]•[dR](T)[sP]•[dR](A)[sP]• |
| | [dR](C)[sP]•[dR](A)[sP]•[dR](T)[sP]•[LR]([5meC])[sP]•[LR](T)[sP]•[LR](T) |
| 1816_54 | [LR](G)[sP]•[LR](A)[sP]•[dR](A)[sP]•[MOE](T)[sP]•[LR]([5meC])[sP]•[dR](T)[sP]• |
| | [LR](T)[sP]•[LR](A)[sP]•[dR](T)[sP]•[dR](T)[sP]•[dR](T)[sP]•[dR](A)[sP]• |
| | [dR](C)[sP]•[dR](A)[sP]•[dR](T)[sP]•[LR]([5meC])[sP]•[LR](T)[sP]•[LR](T) |
| 1816_55 | [LR](G)[sP]•[LR](A)[sP]•[MOE](A)[sP]•[dR](T)[sP]•[LR]([5meC])[sP]•[dR](T)[sP]• |
| | [LR](T)[sP]•[LR](A)[sP]•[dR](T)[sP]•[dR](T)[sP]•[dR](T)[sP]•[dR](A)[sP]• |
| | [dR](C)[sP]•[dR](A)[sP]•[dR](T)[sP]•[LR]([5meC])[sP]•[LR](T)[sP]•[LR](T) |
| 1816_56 | [LR](G)[sP]•[MOE](A)[sP]•[dR](A)[sP]•[dR](T)[sP]•[LR]([5meC])[sP]•[dR](T)[sP]• |
| | [LR](T)[sP]•[LR](A)[sP]•[dR](T)[sP]•[dR](T)[sP]•[dR](T)[sP]•[dR](A)[sP]• |
| | [dR](C)[sP]•[dR](A)[sP]•[dR](T)[sP]•[LR]([5meC])[sP]•[LR](T)[sP]•[LR](T) |
| 1816_57 | [LR](G)[sP]•[LR](A)[sP]•[dR](A)[sP]•[dR](T)[sP]•[LR]([5meC])[sP]•[dR](T)[sP]• |
| | [LR](T)[sP]•[LR](A)[sP]•[dR](T)[sP]•[dR](T)[sP]•[dR](T)[sP]•[dR](A)[sP]• |
| | [dR](C)[sP]•[mR](A)[sP]•[dR](T)[sP]•[LR]([5meC])[sP]•[LR](T)[sP]•[LR](T) |
| 1816_58 | [LR](G)[sP]•[LR](A)[sP]•[dR](A)[sP]•[dR](T)[sP]•[LR]([5meC])[sP]•[dR](T)[sP]• |
| | [LR](T)[sP]•[LR](A)[sP]•[dR](T)[sP]•[dR](T)[sP]•[dR](T)[sP]•[dR](A)[sP]• |
| | [mR](C)[sP]•[dR](A)[sP]•[dR](T)[sP]•[LR]([5meC])[sP]•[LR](T)[sP]•[LR](T) |
| 1816_59 | [LR](G)[sP]•[LR](A)[sP]•[dR](A)[sP]•[dR](T)[sP]•[LR]([5meC])[sP]•[dR](T)[sP]• |
| | [LR](T)[sP]•[LR](A)[sP]•[dR](T)[sP]•[dR](T)[sP]•[dR](T)[sP]•[mR](A)[sP]• |
| | [dR](C)[sP]•[dR](A)[sP]•[dR](T)[sP]•[LR]([5meC])[sP]•[LR](T)[sP]•[LR](T) |
| 1816_60 | [LR](G)[sP]•[LR](A)[sP]•[dR](A)[sP]•[dR](T)[sP]•[LR]([5meC])[sP]•[dR](T)[sP]• |
| | [LR](T)[sP]•[mR](A)[sP]•[dR](T)[sP]•[dR](T)[sP]•[dR](T)[sP]•[dR](A)[sP]• |
| | [dR](C)[sP]•[dR](A)[sP]•[dR](T)[sP]•[LR]([5meC])[sP]•[LR](T)[sP]•[LR](T) |
| 1816_61 | [LR](G)[sP]•[LR](A)[sP]•[mR](A)[sP]•[dR](T)[sP]•[LR]([5meC])[sP]•[dR](T)[sP]• |
| | [LR](T)[sP]•[LR](A)[sP]•[dR](T)[sP]•[dR](T)[sP]•[dR](T)[sP]•[dR](A)[sP]• |
| | [dR](C)[sP]•[dR](A)[sP]•[dR](T)[sP]•[LR]([5meC])[sP]•[LR](T)[sP]•[LR](T) |
| 1816_62 | [LR](G)[sP]•[mR](A)[sP]•[dR](A)[sP]•[dR](T)[sP]•[LR]([5meC])[sP]•[dR](T)[sP]• |
| | [LR](T)[sP]•[LR](A)[sP]•[dR](T)[sP]•[dR](T)[sP]•[dR](T)[sP]•[dR](A)[sP]• |
| | [dR](C)[sP]•[dR](A)[sP]•[dR](T)[sP]•[LR]([5meC])[sP]•[LR](T)[sP]•[LR](T) |
| 1816_63 | [LR](G)[sP]•[LR](A)[sP]•[dR](A)[sP]•[dR](T)[sP]•[fR](C)[sP]•[dR](T)[sP]• |
| | [LR](T)[sP]•[LR](A)[sP]•[dR](T)[sP]•[dR](T)[sP]•[dR](T)[sP]•[dR](A)[sP]• |
| | [dR](C)[sP]•[dR](A)[sP]•[dR](T)[sP]•[LR]([5meC])[sP]•[LR](T)[sP]•[LR](T) |
| 1816_64 | [LR](G)[sP]•[LR](A)[sP]•[dR](A)[sP]•[dR](T)[sP]•[LR]([5meC])[sP]•[dR](T)[sP]• |
| | [LR](T)[sP]•[LR](A)[sP]•[dR](T)[sP]•[dR](T)[sP]•[dR](T)[sP]•[dR](A)[sP]• |
| | [dR](C)[sP]•[dR](A)[sP]•[dR](T)[sP]•[fR](C)[sP]•[LR](T)[sP]•[LR](T) |
| 1816_65 | [LR](G)[sP]•[LR](A)[sP]•[dR](A)[sP]•[dR](T)[sP]•[LR]([5meC])[sP]•[dR](T)[sP]• |
| | [LR](T)[sP]•[LR](A)[sP]•[dR](T)[sP]•[dR](T)[sP]•[dR](T)[sP]•[dR](A)[sP]• |
| | [dR](C)[sP]•[dR](A)[sP]•[dR](T)[sP]•[mR](C)[sP]•[LR](T)[sP]•[LR](T) |
| 1816_66 | [LR](G)[sP]•[LR](A)[sP]•[dR](A)[sP]•[dR](T)[sP]•[mR](C)[sP]•[dR](T)[sP]• |
| | [LR](T)[sP]•[LR](A)[sP]•[dR](T)[sP]•[dR](T)[sP]•[dR](T)[sP]•[dR](A)[sP]• |
| | [dR](C)[sP]•[dR](A)[sP]•[dR](T)[sP]•[LR]([5meC])[sP]•[LR](T)[sP]•[LR](T) |
| 1816_67 | [LR](G)[sP]•[LR](A)[sP]•[dR](A)[sP]•[dR](T)[sP]•[LR]([5meC])[sP]•[dR](T)[sP]• |
| | [fR](U)[sP]•[LR](A)[sP]•[dR](T)[sP]•[dR](T)[sP]•[dR](T)[sP]•[dR](A)[sP]• |
| | [dR](C)[sP]•[dR](A)[sP]•[dR](T)[sP]•[LR]([5meC])[sP]•[LR](T)[sP]•[LR](T) |
| 1816_68 | [LR](G)[sP]•[LR](A)[sP]•[dR](A)[sP]•[dR](T)[sP]•[LR]([5meC])[sP]•[dR](T)[sP]• |
| | [LR](T)[sP]•[LR](A)[sP]•[dR](T)[sP]•[dR](T)[sP]•[dR](T)[sP]•[dR](A)[sP]• |
| | [dR](C)[sP]•[dR](A)[sP]•[dR](T)[sP]•[LR]([5meC])[sP]•[fR](U)[sP]•[LR](T) |
| 1816_69 | [LR](G)[sP]•[LR](A)[sP]•[dR](A)[sP]•[dR](T)[sP]•[LR]([5meC])[sP]•[dR](T)[sP]• |
| | [LR](T)[sP]•[LR](A)[sP]•[dR](T)[sP]•[dR](T)[sP]•[dR](T)[sP]•[dR](A)[sP]• |
| | [dR](C)[sP]•[dR](A)[sP]•[fR](U)[sP]•[LR]([5meC])[sP]•[LR](T)[sP]•[LR](T) |
| 1816_70 | [LR](G)[sP]•[LR](A)[sP]•[dR](A)[sP]•[dR](T)[sP]•[LR]([5meC])[sP]•[dR](T)[sP]• |
| | [LR](T)[sP]•[LR](A)[sP]•[dR](T)[sP]•[dR](T)[sP]•[fR](U)[sP]•[dR](A)[sP]• |
| | [dR](C)[sP]•[dR](A)[sP]•[dR](T)[sP]•[LR]([5meC])[sP]•[LR](T)[sP]•[LR](T) |
| 1816_71 | [LR](G)[sP]•[LR](A)[sP]•[dR](A)[sP]•[dR](T)[sP]•[LR]([5meC])[sP]•[dR](T)[sP]• |
| | [LR](T)[sP]•[LR](A)[sP]•[dR](T)[sP]•[fR](U)[sP]•[dR](T)[sP]•[dR](A)[sP]• |
| | [dR](C)[sP]•[dR](A)[sP]•[dR](T)[sP]•[LR]([5meC])[sP]•[LR](T)[sP]•[LR](T) |
| 1816_72 | [LR](G)[sP]•[LR](A)[sP]•[dR](A)[sP]•[dR](T)[sP]•[LR]([5meC])[sP]•[dR](T)[sP]• |
| | [LR](T)[sP]•[LR](A)[sP]•[fR](U)[sP]•[dR](T)[sP]•[dR](T)[sP]•[dR](A)[sP]• |
| | [dR](C)[sP]•[dR](A)[sP]•[dR](T)[sP]•[LR]([5meC])[sP]•[LR](T)[sP]•[LR](T) |
| 1816_73 | [LR](G)[sP]•[LR](A)[sP]•[dR](A)[sP]•[dR](T)[sP]•[LR]([5meC])[sP]•[fR](U)[sP]• |
| | [LR](T)[sP]•[LR](A)[sP]•[dR](T)[sP]•[dR](T)[sP]•[dR](T)[sP]•[dR](A)[sP]• |
| | [dR](C)[sP]•[dR](A)[sP]•[dR](T)[sP]•[LR]([5meC])[sP]•[LR](T)[sP]•[LR](T) |
| 1816_74 | [LR](G)[sP]•[LR](A)[sP]•[dR](A)[sP]•[fR](U)[sP]•[LR]([5meC])[sP]•[dR](T)[sP]• |
| | [LR](T)[sP]•[LR](A)[sP]•[dR](T)[sP]•[dR](T)[sP]•[dR](T)[sP]•[dR](A)[sP]• |
| | [dR](C)[sP]•[dR](A)[sP]•[dR](T)[sP]•[LR]([5meC])[sP]•[LR](T)[sP]•[LR](T) |

### Example 14: Testing in vitro efficacy of LNA oligonucleotides in iCell® GlutaNeurons at 1.25 μM and 62.5 nM

### Materials and Methods:

[0514] The compounds of the redesign library described in Table 11 of Example 13 were evaluated for potency in human iPSC cells using two concentrations; 1.25 μM and 62.5 nM, comparing the effect on the ATXN3 transcript and the KCNB2 transcript at both concentrations.

[0515] The iCell GlutaNeuron cells were prepared and maintained essentially as described in Example 5 & Table 2. 96-well cell culture plates were coated with Poly-L-Ornithine (0.01%) (Sigma-P4957), 100μl/well for 4 hours. Rinsed 3 times with PBS and coated with Laminin (Roche Diagnostic, 11243217001) 0.5 mg/ml diluted 1:500 in PBS overnight at 4 degrees Celsius. The cells were treated and maintained as per recommendation by the vendor using the provided protocol: iCell® GlutaNeurons, User's Guide, Document ID: X1005, Version 1.2, Cellular Dynamics, Fujifilm; available at https: address cdn.stemcell.com/media/files/manual/MADX1005-icell_glutaneurons_users_guide.pdf (accessed on e.g. 10 Nov. 2020). Compounds were added to the cells from pre-dilution plates (compound diluted in PBS) to reach the desired final concentration. RNA purification and qPCR were performed as described in Example 2; however, using the qPCR assays described below for analysis.

Human KCNB2 pre-mRNA using the qPCR assay:
“Hs.PT.58.39309562”, PrimeTime ® XL qPCR Assay
(Integrated DNA Technologies (IDT),
Leuven, Belgium)
(SEQ ID NO: 1989)
Probe: 5′-/56-FAM/AGA AAC CTA/ZEN/ACT CAT CAG TGG
CTG CAA/3IABkFQ/-3′
(SEQ ID NO: 1990)
Primer 1: 5′-GAA CAG GAT AGA CAC GAT GGC-3′
(SEQ ID NO: 1991)
Primer 2: 5′-AGA GAC TAT GCG AGA GCG A-3′
Human ATXN3 pre-mRNA using the qPCR assay: costum
design “(ATXN3_exon_8-9(1)”, PrimeTime ®
XL qPCR Assay (IDT).
(SEQ ID NO: 1134)
Probe: 5′-/56-FAM/CTCCGCAGG/ZEN/GCT ATTCAGCT
AAGT/31ABkFQ/-3′
(SEQ ID NO: 1135)
Primer 1: 5′-AGT AAGATTTGT ACCTGATGTCTGT-3′
(SEQ ID NO: 1136)
Primer 2: 5′-CATGGAAGATGAGGAAGCAGAT-3′
Human TBP pre-mRNA using the qPCR assay:
“Hs.PT.58v.39858774”, PrimeTime ® XL
qPCR Assay (IDT)
(SEQ ID NO: 1131)
Probe: 5′-/5HEX/TGA TCT TTG/ZEN/CAG TGA CCC AGC
ATC A/3IABkFQ/-3′
(SEQ ID NO: 1132)
Primer 1: 5′-GCT GTT TAA CTT CGC TTC CG-3′
(SEQ ID NO: 1133)
Primer 2: 5′-CAG CAA CTT CCT CAA TTC CTT G-3′

### Results:

[0516] The results from this screen is presented in Table 12 as the level of remaining transcript with values given in percent (%) relative to untreated cells, i.e. low level means efficient knockdown. This was done for each of the applied concentrations for each of the two target genes (ATXN3 and KCNB2). Most of the tested compounds showed efficacious knockdown of the ATXN3 transcript at both concentrations used. The effect on the KCNB2 transcript was variable.

TABLE 12

| | 1.25 uM (% | 62.5 nM (% | 1.25 uM (% | 62.5 nM (% |
|---|---|---|---|---|
| | ATXN3 | ATXN3 | KCNB2 | KCNB2 |
| CMP ID | mRNA | mRNA | mRNA | mRNA |
| NO | remaining) | remaining) | remaining) | remaining) |
| 1122_33 | 14.84 | 41.69 | 66.57 | 88.67 |
| 1122_67 | 15.03 | 39.41 | 9.93 | 59.09 |
| 1122_82 | 18.29 | 50.93 | 17.61 | 73.26 |
| 1122_83 | 18.12 | 54.07 | 84.73 | 96.23 |
| 1122_84 | 12.59 | 40.95 | 27.66 | 74.71 |
| 1122_85 | 15.13 | 40.70 | 23.47 | 82.11 |
| 1122_86 | 16.64 | 53.29 | 75.13 | 113.41 |
| 1122_87 | 13.46 | 35.67 | 19.90 | 69.29 |
| 1122_88 | 12.85 | 34.25 | 24.41 | 68.38 |
| 1122_89 | 16.45 | 46.10 | 38.00 | 75.09 |
| 1122_90 | 18.52 | 50.88 | 60.64 | 93.90 |
| 1122_91 | 17.83 | 45.26 | 35.19 | 86.04 |
| 1122_92 | 15.49 | 41.46 | 21.27 | 68.79 |
| 1122_93 | 65.98 | 89.20 | 90.58 | 103.35 |
| 1122_94 | 63.83 | 92.70 | 82.15 | 98.30 |
| 1122_95 | 15.40 | 35.25 | 6.65 | 49.08 |
| 1122_96 | 16.51 | 44.63 | 2.69 | 48.45 |
| 1122_97 | 37.79 | 65.35 | 42.78 | 75.62 |
| 1122_98 | 14.34 | 38.27 | 0.91 | 42.75 |
| 1122_99 | 33.48 | 58.08 | 25.62 | 69.29 |
| 1122_100 | 12.21 | 31.92 | 0.85 | 44.41 |
| 1122_101 | 15.41 | 46.59 | 60.45 | 90.56 |
| 1122_102 | 15.62 | 41.71 | 16.98 | 62.88 |
| 1122_103 | 14.11 | 37.53 | 2.61 | 46.87 |
| 1122_104 | 18.01 | 47.10 | 36.56 | 81.02 |
| 1122_105 | 18.20 | 43.65 | 19.99 | 74.46 |
| 1122_106 | 16.64 | 36.77 | 7.75 | 55.14 |
| 1122_107 | 14.84 | 41.59 | 32.47 | 69.47 |
| 1122_108 | 12.89 | 32.26 | 8.10 | 72.49 |
| 1122_109 | 15.35 | 35.47 | 2.01 | 57.70 |
| 1122_110 | 19.02 | 45.56 | 0.72 | 45.61 |
| 1122_111 | 55.00 | 73.98 | 36.41 | 88.13 |
| 1122_112 | 16.38 | 40.70 | 0.77 | 50.17 |
| 1122_113 | 29.42 | 56.92 | 17.68 | 60.51 |
| 1122_114 | 13.63 | 33.67 | 0.43 | 42.62 |
| 1122_115 | 18.86 | 46.13 | 57.49 | 98.41 |
| 1122_116 | 31.73 | 59.42 | 28.44 | 86.09 |
| 1122_117 | 26.55 | 55.77 | 10.27 | 67.46 |
| 1122_118 | 49.24 | 68.77 | 52.70 | 88.13 |
| 1122_119 | 19.51 | 44.68 | 9.36 | 60.99 |
| 1122_120 | 16.50 | 40.36 | 2.16 | 51.59 |
| 1122_121 | 16.61 | 40.45 | 5.55 | 56.34 |
| 1122_123 | 15.49 | 38.63 | 0.95 | 52.77 |
| 1122_124 | 28.90 | 54.57 | 17.31 | 68.48 |
| 1122_125 | 15.75 | 41.51 | 12.29 | 63.50 |
| 1122_126 | 15.68 | 44.30 | 9.96 | 63.90 |
| 1122_127 | 14.91 | 45.71 | 9.92 | 55.07 |
| 1122_128 | 18.12 | 46.12 | 20.98 | 79.79 |
| 1122_129 | 15.62 | 44.07 | 9.19 | 69.22 |
| 1122_130 | 14.90 | 43.91 | 8.27 | 68.50 |
| 1122_131 | 17.75 | 46.92 | 20.03 | 67.67 |
| 1122_132 | 17.93 | 41.86 | 8.22 | 72.39 |
| 1122_133 | 18.11 | 47.91 | 14.60 | 78.23 |
| 1122_134 | 17.42 | 48.52 | 14.02 | 61.73 |
| 1122_135 | 14.62 | 46.43 | 3.71 | 52.73 |
| 1122_136 | 16.28 | 35.03 | 8.48 | 56.82 |
| 1122_137 | 14.92 | 37.45 | 12.42 | 65.30 |
| 1122_138 | 14.40 | 37.58 | 14.48 | 63.64 |
| 1122_139 | 15.06 | 38.30 | 14.21 | 66.30 |
| 1122_140 | 14.40 | 37.78 | 18.42 | 63.01 |
| 1122_141 | 16.19 | 37.64 | 16.31 | 64.03 |
| 1122_142 | 15.90 | 40.17 | 15.61 | 61.47 |
| 1122_143 | 14.70 | 103.24 | 12.58 | 109.05 |
| 1122_144 | 15.85 | 38.70 | 24.26 | 63.50 |
| 1122_145 | 14.15 | 36.53 | 13.02 | 67.51 |
| 1122_146 | 15.95 | 38.11 | 20.70 | 69.38 |
| 1122_147 | 15.08 | 40.89 | 19.48 | 62.04 |
| 1122_148 | 17.05 | 37.47 | 15.74 | 57.67 |
| 1122_149 | 15.43 | 35.40 | 43.92 | 78.04 |
| 1122_150 | 14.10 | 34.07 | 43.11 | 82.00 |
| 1122_151 | 15.65 | 37.73 | 48.08 | 92.95 |
| 1122_152 | 13.89 | 33.97 | 32.02 | 83.04 |
| 1122_153 | 13.97 | 35.53 | 40.47 | 82.39 |
| 1122_154 | 13.75 | 34.07 | 35.44 | 86.80 |
| 1122_155 | 14.15 | 43.77 | 43.08 | 83.80 |
| 1122_156 | 15.13 | 37.99 | 44.64 | 87.46 |
| 1122_157 | 14.34 | 40.19 | 57.37 | 88.72 |
| 1122_158 | 13.68 | 35.71 | 42.68 | 80.61 |
| 1122_159 | 15.47 | 40.55 | 57.30 | 86.78 |
| 1122_160 | 13.51 | 38.20 | 36.47 | 80.75 |
| 1122_161 | 15.52 | 42.53 | 10.78 | 64.30 |
| 1122_162 | 16.08 | 46.05 | 43.50 | 90.89 |
| 1122_163 | 17.28 | 45.49 | 42.75 | 86.76 |
| 1122_164 | 33.44 | 63.29 | 64.52 | 94.34 |
| 1122_165 | 29.00 | 63.38 | 67.97 | 84.55 |
| 1122_166 | 16.50 | 50.60 | 37.71 | 85.58 |
| 1122_167 | 12.92 | 42.08 | 37.91 | 76.46 |
| 1122_168 | 17.21 | 53.77 | 74.23 | 98.46 |
| 1122_169 | 13.00 | 41.35 | 17.57 | 69.24 |
| 1122_170 | 15.62 | 48.53 | 71.05 | 92.86 |
| 1122_171 | 12.95 | 35.94 | 10.80 | 59.51 |
| 1122_172 | 14.15 | 40.39 | 30.00 | 76.26 |
| 1122_173 | 16.04 | 48.13 | 50.42 | 95.73 |
| 1122_174 | 16.06 | 46.62 | 27.28 | 75.84 |
| 1122_175 | 17.19 | 41.23 | 44.35 | 89.61 |
| 1122_176 | 12.72 | 38.58 | 24.65 | 74.88 |
| 1122_177 | 43.57 | 68.03 | 56.40 | 78.38 |
| 1122_178 | 18.39 | 48.85 | 7.77 | 60.36 |
| 1122_179 | 12.21 | 36.54 | 0.66 | 39.24 |
| 1122_180 | 11.41 | 29.30 | 2.53 | 50.10 |
| 1122_181 | 11.39 | 29.60 | 1.37 | 45.39 |
| 1122_182 | 11.91 | 33.43 | 1.00 | 38.58 |
| 1122_183 | 15.53 | 53.20 | 70.04 | 89.74 |
| 1122_184 | 18.29 | 50.25 | 71.87 | 94.73 |
| 1122_185 | 12.42 | 38.65 | 16.98 | 64.32 |
| 1122_186 | 15.43 | 35.73 | 0.60 | 38.92 |
| 1122_188 | 95.10 | 91.87 | 98.34 | 92.17 |
| 1122_189 | 13.17 | 45.93 | 42.56 | 81.86 |
| 1122_190 | 88.24 | 96.08 | 101.92 | 93.17 |
| 1122_191 | 17.43 | 47.23 | 35.22 | 84.24 |
| 1122_192 | 14.50 | 41.74 | 2.75 | 47.15 |
| 1122_193 | 17.94 | 45.59 | 16.35 | 70.52 |
| 1122_194 | 19.14 | 42.96 | 2.51 | 44.63 |
| 1122_195 | 15.03 | 41.04 | 6.84 | 58.60 |
| 1122_196 | 14.86 | 39.28 | 0.98 | 47.63 |
| 1122_197 | 14.80 | 39.13 | 0.62 | 45.40 |
| 1122_198 | 23.68 | 54.40 | 20.87 | 71.13 |
| 1122_199 | 22.98 | 50.51 | 18.55 | 67.76 |
| 1122_200 | 23.58 | 50.62 | 37.86 | 81.81 |
| 1122_201 | 19.40 | 46.35 | 7.15 | 59.27 |
| 1122_202 | 18.20 | 46.98 | 5.78 | 54.72 |
| 1122_203 | 17.69 | 45.67 | 2.10 | 48.19 |
| 1122_204 | 13.49 | 37.08 | 0.50 | 43.42 |
| 1122_205 | 115.04 | 44.88 | 5.19 | 83.93 |
| 1122_206 | 12.85 | 35.68 | 1.05 | 52.13 |
| 1122_207 | 16.58 | 45.34 | 58.08 | 97.54 |
| 1122_208 | 17.59 | 47.72 | 13.12 | 61.52 |
| 1122_209 | 18.16 | 44.97 | 35.65 | 72.69 |
| 1122_210 | 17.36 | 47.09 | 30.36 | 68.94 |
| 1122_211 | 19.96 | 46.56 | 20.87 | 72.34 |
| 1122_212 | 24.09 | 54.75 | 49.10 | 83.35 |
| 1122_213 | 18.37 | 48.15 | 27.49 | 74.55 |
| 1122_214 | 14.29 | 39.30 | 15.92 | 66.14 |
| 1122_215 | 15.37 | 38.56 | 2.04 | 41.18 |
| 1122_216 | 15.01 | 42.66 | 7.02 | 58.95 |
| 1122_217 | 17.30 | 46.90 | 32.59 | 82.10 |
| 1122_218 | 13.77 | 42.95 | 25.43 | 71.68 |
| 1122_219 | 12.87 | 37.59 | 17.95 | 52.45 |
| 1122_220 | 13.52 | 38.61 | 1.85 | 48.48 |
| 1122_221 | 18.36 | 45.47 | 29.00 | 75.06 |
| 1122_222 | 23.95 | 54.80 | 19.25 | 67.91 |
| 1122_223 | 19.96 | 48.20 | 33.50 | 74.16 |
| 1122_224 | 68.09 | 95.88 | 81.06 | 104.47 |
| 1122_225 | 31.31 | 66.62 | 53.44 | 90.70 |
| 1122_226 | 102.33 | 93.40 | 96.03 | 101.72 |
| 1122_227 | 17.68 | 49.92 | 63.44 | 98.06 |
| 1122_228 | 12.94 | 28.36 | 0.52 | 40.67 |
| 1122_229 | 13.82 | 36.60 | 25.36 | 83.32 |
| 1122_230 | 13.78 | 29.77 | 1.16 | 53.35 |
| 1122_231 | 13.75 | 34.55 | 14.04 | 67.82 |
| 1122_232 | 12.79 | 33.53 | 16.70 | 73.24 |
| 1122_233 | 11.52 | 28.88 | 0.67 | 39.96 |
| 1122_234 | 12.10 | 29.35 | 0.12 | 30.89 |
| 1122_235 | 10.75 | 31.37 | 1.35 | 45.12 |
| 1122_236 | 15.54 | 36.00 | 19.38 | 78.46 |
| 1122_237 | 14.85 | 38.11 | 20.56 | 76.35 |
| 1122_238 | 98.98 | 100.70 | 93.56 | 109.21 |
| 1122_239 | 18.93 | 56.23 | 59.59 | 93.71 |
| 1122_240 | 14.80 | 38.69 | 0.90 | 42.40 |
| 1122_241 | 15.37 | 46.65 | 20.38 | 66.87 |
| 1122_242 | 15.24 | 42.10 | 13.87 | 68.39 |
| 1122_243 | 15.73 | 44.21 | 14.67 | 66.50 |
| 1122_244 | 14.11 | 40.27 | 0.86 | 39.99 |
| 1122_245 | 13.14 | 33.83 | 0.38 | 39.46 |
| 1122_247 | 12.86 | 33.71 | 0.90 | 43.55 |
| 1122_248 | 90.91 | 95.53 | 106.59 | 91.46 |
| 1122_249 | 14.22 | 41.84 | 40.90 | 87.00 |
| 1122_250 | 90.31 | 100.03 | 100.46 | 97.45 |
| 1122_251 | 102.82 | 102.41 | 98.63 | 99.26 |
| 1122_252 | 16.50 | 48.66 | 38.13 | 85.83 |
| 1122_253 | 17.79 | 48.73 | 31.96 | 79.20 |
| 1122_254 | 16.26 | 46.83 | 26.68 | 70.97 |
| 1122_255 | 16.23 | 39.36 | 1.22 | 48.88 |
| 1122_256 | 18.48 | 44.91 | 7.37 | 62.07 |
| 1122_257 | 18.72 | 43.81 | 1.85 | 49.52 |
| 1122_258 | 28.90 | 59.55 | 22.76 | 80.32 |
| 1122_259 | 13.02 | 35.53 | 0.27 | 37.49 |
| 1122_260 | 39.03 | 64.19 | 25.97 | 75.30 |
| 1122_261 | 25.96 | 54.58 | 4.80 | 54.40 |
| 1122_262 | 64.09 | 79.15 | 48.38 | 86.81 |
| 1122_263 | 41.44 | 64.92 | 14.48 | 60.49 |
| 1122_264 | 31.93 | 53.80 | 8.86 | 57.82 |
| 1122_265 | 21.30 | 46.83 | 1.90 | 48.70 |
| 1122_266 | 12.74 | 38.89 | 0.38 | 39.26 |
| 1122_267 | 13.34 | 34.60 | 0.35 | 35.53 |
| 1122_268 | 21.75 | 52.36 | 45.71 | 88.45 |
| 1122_269 | 15.62 | 34.21 | 0.99 | 42.01 |
| 1122_270 | 18.23 | 48.08 | 55.25 | 92.41 |
| 1122_271 | 29.49 | 58.90 | 12.49 | 74.08 |
| 1122_272 | 22.71 | 53.62 | 17.96 | 86.69 |
| 1122_273 | 30.84 | 63.97 | 39.74 | 79.91 |
| 1122_274 | 25.06 | 55.33 | 14.72 | 72.24 |
| 1122_275 | 46.36 | 77.28 | 49.33 | 91.76 |
| 1122_276 | 22.07 | 52.96 | 22.13 | 75.39 |
| 1122_277 | 24.76 | 52.41 | 2.80 | 104.85 |
| 1122_278 | 16.09 | 39.55 | 1.05 | 53.39 |
| 1122_279 | 16.97 | 41.64 | 2.59 | 53.82 |
| 1122_280 | 19.16 | 47.62 | 53.88 | 89.20 |
| 1122_281 | 15.33 | 35.15 | 1.21 | 49.25 |
| 1122_282 | 18.74 | 46.47 | 19.18 | 70.60 |
| 1122_283 | 14.21 | 38.75 | 0.92 | 49.39 |
| 1122_284 | 21.36 | 50.04 | 17.88 | 77.20 |
| 1122_285 | 24.58 | 53.16 | 11.30 | 69.32 |
| 1122_286 | 26.61 | 59.28 | 32.18 | 85.20 |
| 1122_287 | 19.11 | 46.43 | 40.68 | 87.49 |
| 1122_288 | 17.38 | 46.11 | 29.23 | 83.51 |
| 1122_289 | 22.65 | 50.00 | 18.22 | 80.28 |
| 1122_290 | 15.73 | 46.26 | 46.94 | 97.94 |
| 1122_291 | 17.59 | 47.83 | 57.89 | 97.49 |
| 1122_292 | 18.87 | 45.34 | 51.24 | 76.10 |
| 1122_293 | 19.91 | 50.35 | 80.98 | 93.18 |
| 1122_294 | 15.68 | 44.72 | 63.82 | 89.72 |
| 1122_295 | 17.72 | 46.95 | 72.65 | 97.04 |
| 1122_296 | 18.22 | 45.33 | 84.64 | 65.09 |
| 1122_297 | 21.12 | 52.34 | 55.13 | 90.63 |
| 1122_298 | 19.04 | 49.85 | 43.05 | 83.36 |
| 1122_299 | 21.00 | 53.98 | 52.09 | 88.91 |
| 1122_300 | 21.03 | 56.31 | 63.83 | 96.36 |
| 1122_301 | 15.75 | 41.51 | 15.41 | 71.45 |
| 1122_302 | 15.98 | 41.88 | 33.75 | 82.19 |
| 1122_303 | 14.92 | 33.22 | 16.97 | 73.97 |
| 1122_304 | 12.17 | 33.01 | 0.96 | 54.41 |
| 1122_305 | 17.66 | 38.97 | 1.49 | 58.34 |
| 1122_306 | 18.52 | 42.72 | 3.38 | 58.51 |
| 1122_307 | 42.52 | 62.86 | 49.15 | 83.10 |
| 1122_308 | 15.75 | 46.33 | 18.59 | 81.21 |
| 1122_309 | 18.69 | 46.63 | 43.91 | 88.58 |
| 1122_310 | 21.63 | 49.10 | 64.20 | 92.07 |
| 1122_311 | 15.23 | 36.71 | 0.82 | 55.64 |
| 1122_312 | 16.28 | 40.30 | 14.72 | 71.61 |
| 1122_313 | 17.13 | 42.41 | 26.14 | 78.29 |
| 1122_314 | 17.15 | 44.16 | 17.44 | 74.43 |
| 1122_315 | 15.87 | 37.68 | 3.87 | 56.29 |
| 1122_316 | 12.46 | 40.91 | 15.99 | 79.86 |
| 1122_317 | 19.92 | 51.35 | 75.13 | 91.76 |
| 1122_318 | 19.72 | 55.90 | 84.62 | 96.07 |
| 1122_319 | 14.89 | 40.90 | 30.49 | 84.12 |
| 1122_320 | 14.12 | 38.83 | 35.60 | 80.47 |
| 1122_321 | 16.55 | 47.64 | 39.44 | 85.96 |
| 1122_322 | 19.89 | 46.85 | 51.06 | 83.91 |
| 1122_323 | 16.91 | 39.33 | 31.59 | 85.79 |
| 1122_324 | 13.32 | 34.73 | 23.93 | 76.58 |
| 1122_325 | 13.64 | 36.88 | 34.23 | 82.54 |
| 1122_326 | 17.03 | 47.80 | 65.51 | 93.50 |
| 1122_327 | 13.18 | 34.45 | 0.61 | 41.05 |
| 1122_328 | 28.85 | 51.75 | 33.40 | 73.68 |
| 1122_329 | 18.98 | 45.02 | 9.68 | 55.71 |
| 1122_330 | 26.09 | 52.37 | 29.65 | 77.91 |
| 1122_331 | 19.50 | 48.30 | 9.77 | 63.78 |
| 1122_332 | 17.96 | 54.05 | 7.57 | 72.56 |
| 1122_333 | 18.01 | 45.82 | 5.15 | 54.92 |
| 1122_334 | 16.51 | 45.70 | 5.62 | 58.84 |
| 1122_335 | 15.28 | 35.40 | 5.27 | 59.31 |
| 1122_336 | 18.18 | 45.30 | 24.99 | 75.94 |
| 1816_2 | 60.44 | 75.00 | 72.19 | 101.12 |
| 1816_3 | 32.49 | 64.72 | 81.52 | 99.97 |
| 1816_4 | 20.62 | 53.39 | 86.99 | 94.28 |
| 1816_5 | 28.44 | 63.88 | 87.90 | 101.86 |
| 1816_6 | 22.90 | 52.87 | 82.34 | 95.59 |
| 1816_7 | 80.07 | 88.95 | 93.22 | 101.92 |
| 1816_8 | 43.52 | 67.76 | 96.84 | 104.02 |
| 1816_9 | 21.44 | 54.71 | 92.27 | 103.41 |
| 1816_10 | 17.09 | 49.44 | 76.99 | 95.59 |
| 1816_11 | 21.06 | 53.06 | 78.28 | 98.39 |
| 1816_12 | 20.06 | 55.59 | 84.79 | 102.08 |
| 1816_13 | 17.14 | 48.05 | 93.50 | 100.40 |
| 1816_14 | 19.55 | 59.40 | 90.51 | 105.28 |
| 1816_15 | 22.72 | 59.25 | 101.19 | 106.47 |
| 1816_16 | 24.44 | 62.31 | 96.03 | 102.54 |
| 1816_17 | 22.53 | 55.69 | 91.49 | 101.21 |
| 1816_18 | 21.46 | 53.93 | 85.50 | 99.48 |
| 1816_19 | 21.31 | 54.40 | 87.10 | 95.06 |
| 1816_20 | 23.72 | 53.87 | 92.47 | 105.09 |
| 1816_21 | 19.76 | 50.72 | 89.60 | 105.93 |
| 1816_22 | 95.15 | 104.15 | 102.13 | 103.05 |
| 1816_24 | 91.75 | 95.00 | 98.28 | 102.02 |
| 1816_25 | 56.04 | 88.36 | 86.52 | 109.26 |
| 1816_26 | 102.21 | 101.78 | 105.12 | 108.00 |
| 1816_27 | 24.15 | 67.01 | 92.61 | 99.83 |
| 1816_28 | 21.76 | 57.39 | 101.49 | 98.46 |
| 1816_29 | 30.53 | 72.76 | 99.75 | 98.54 |
| 1816_30 | 24.86 | 57.27 | 74.75 | 84.15 |
| 1816_31 | 41.00 | 72.35 | 106.54 | 101.47 |
| 1816_32 | 21.68 | 53.64 | 83.45 | 100.28 |
| 1816_33 | 36.10 | 74.71 | 78.48 | 109.62 |
| 1816_34 | 43.48 | 68.78 | 90.47 | 99.53 |
| 1816_35 | 78.05 | 89.09 | 93.93 | 96.53 |
| 1816_36 | 81.65 | 87.07 | 91.10 | 97.06 |
| 1816_37 | 62.87 | 82.62 | 96.63 | 102.82 |
| 1816_38 | 34.50 | 62.63 | 88.71 | 98.47 |
| 1816_39 | 17.06 | 43.55 | 68.41 | 91.25 |
| 1816_40 | 22.42 | 59.75 | 58.94 | 93.82 |
| 1816_41 | 24.34 | 60.50 | 78.94 | 94.74 |
| 1816_42 | 17.21 | 51.49 | 88.87 | 106.71 |
| 1816_43 | 15.45 | 48.67 | 93.79 | 96.40 |
| 1816_44 | 27.69 | 62.14 | 89.86 | 98.76 |
| 1816_45 | 28.43 | 62.53 | 93.60 | 104.83 |
| 1816_46 | 38.65 | 95.31 | 99.48 | 95.34 |
| 1816_47 | 39.25 | 73.69 | 85.32 | 99.46 |
| 1816_48 | 72.88 | 95.79 | 95.86 | 105.23 |
| 1816_49 | 42.05 | 72.73 | 95.26 | 95.07 |
| 1816_50 | 24.87 | 61.64 | 93.95 | 95.41 |
| 1816_51 | 24.13 | 58.48 | 94.87 | 86.45 |
| 1816_52 | 19.07 | 46.64 | 61.73 | 103.50 |
| 1816_53 | 24.65 | 59.39 | 95.95 | 103.39 |
| 1816_54 | 18.52 | 50.37 | 75.25 | 100.65 |
| 1816_55 | 21.38 | 55.81 | 80.93 | 97.54 |
| 1816_56 | 23.72 | 74.56 | 81.95 | 94.12 |
| 1816_57 | 31.08 | 63.23 | 97.13 | 97.12 |
| 1816_58 | 26.25 | 60.06 | 82.44 | 91.63 |
| 1816_59 | 38.54 | 74.45 | 96.86 | 99.10 |
| 1816_60 | 21.27 | 53.40 | 102.79 | 95.99 |
| 1816_61 | 22.84 | 55.21 | 84.32 | 108.50 |
| 1816_62 | 28.18 | 66.34 | 89.02 | 100.92 |
| 1816_63 | 22.52 | 58.32 | 99.09 | 104.39 |
| 1816_64 | 17.21 | 48.69 | 101.88 | 109.05 |
| 1816_65 | 18.02 | 48.71 | 97.59 | 108.12 |
| 1816_66 | 24.48 | 59.70 | 98.74 | 91.48 |
| 1816_67 | 25.08 | 60.20 | 102.17 | 102.41 |
| 1816_68 | 18.20 | 52.03 | 93.53 | 107.27 |
| 1816_69 | 28.58 | 64.76 | 100.03 | 95.56 |
| 1816_70 | 32.32 | 65.70 | 93.94 | 104.28 |
| 1816_71 | 47.83 | 78.25 | 89.25 | 109.07 |
| 1816_72 | 35.33 | 62.27 | 91.64 | 107.72 |
| 1816_73 | 20.55 | 98.77 | 85.68 | 103.65 |
| 1816_74 | 26.71 | 60.10 | 87.66 | 99.83 |

### Example 15: In vitro toxicity evaluation caspase assays

### Materials and Methods:

[0517] Based on the results in Table 12, the compounds most potent in targeting ATXN3 with the least effect on KCNB2 were selected for toxicity evaluation in two caspase activation assays (see Dieckmann et al., Molecular Therapy: Nucleic Acids Vol. 10 Mar. 2018, pp 45-54); respectively conducted in HepG2 cells (“HEPG2”) and 3T3 cells (“3T3”), Results:

[0518] The results are shown in Table 13. Using the same scoring criteria as in Example 7, the vast majority of the compounds were found safe in the toxicity assessment. In the “HEPG2” assay, compound 1816_52 had a score of 0.5, compounds 1816_30 and 1816_40 a score of 1, and compound 1816_39 a score of 3. In the “313” assay, the compounds with a score of 0.5 were: 1816_11, 1816_74, and 1816_30; the compounds with a score of I were: 1816_54 and 1816_10; the compound with a score of two was: 1816_52; and the compounds with a score of three were: 1816_40 and 1816_39.

TABLE 13

| | HepG2 | 3T3 | EC50 | EC50 | EC50 ratio |
|---|---|---|---|---|---|
| | Assay | Assay | ATXN3 | KCNB2 | (KCNB2/ |
| CMPIDNO | score | score | (nM) | (nM) | ATXN3) |
| 1122_33 | 0 | 0 | 103.7 | 2330 | 22.5 |
| 1122_67 | 0 | 0 | 71.09 | 155.40 | 2.20 |
| 1122_91 | 0 | 0 | 87.73 | 673.50 | 7.68 |
| 1122_107 | 0 | 0 | 89.93 | 789.00 | 8.77 |
| 1122_125 | 0 | 0 | 81.85 | 98.95 | 1.2 |
| 1122_144 | 0 | 0 | 103.10 | 515.60 | 5.00 |
| 1122_146 | 0 | 0 | 93.11 | 490.10 | 5.26 |
| 1122_149 | 0 | 0 | 62.77 | 766.80 | 12.22 |
| 1122_150 | 0 | 0 | 89.36 | 808.50 | 9.05 |
| 1122_151 | 0 | 0 | 75.71 | 654.80 | 8.65 |
| 1122_152 | 0 | 0 | 66.09 | 662.20 | 10.02 |
| 1122_153 | 0 | 0 | 84.38 | 1208.00 | 14.32 |
| 1122_154 | 0 | 0 | 64.22 | 820.00 | 12.77 |
| 1122_155 | 0 | 0 | 75.16 | 1303.00 | 17.34 |
| 1122_156 | 0 | 0 | 55.26 | 736.10 | 13.32 |
| 1122_157 | 0 | 0 | 71.27 | 1658.00 | 23.26 |
| 1122_158 | 0 | 0 | 53.18 | 1217.00 | 22.88 |
| 1122_159 | 0 | 0 | 92.93 | 1472.00 | 15.84 |
| 1122_160 | 0 | 0 | 57.47 | 791.50 | 13.77 |
| 1122_163 | 0 | 0 | 98.81 | 564.40 | 5.71 |
| 1122_167 | 0 | 0 | 87.59 | 763.60 | 8.72 |
| 1122_172 | 0 | 0 | 67.13 | 465.70 | 6.94 |
| 1122_175 | 0 | 0 | 127.90 | 1277.00 | 9.98 |
| 1122_218 | 0 | 0 | 87.76 | 311.80 | 3.55 |
| 1122_294 | 0 | 0 | 93.12 | 2338.00 | 25.11 |
| 1122_296 | 0 | 0 | 114.80 | 8032.00 | 69.97 |
| 1122_302 | 0 | 0 | 104.10 | 682.80 | 6.56 |
| 1122_313 | 0 | 0 | 90.50 | 418.70 | 4.63 |
| 1122_319 | 0 | 0 | 70.04 | 408.20 | 5.83 |
| 1122_320 | 0 | 0 | 87.66 | 364.50 | 4.16 |
| 1122_323 | 0 | 0 | 99.59 | 720.60 | 7.24 |
| 1122_325 | 0 | 0 | 90.83 | 585.40 | 6.45 |
| 1816_4 | 0 | 0 | 200.90 | 248307.00 | 1235.97 |
| 1816_6 | 0 | 0 | 261.00 | 26826.00 | 102.78 |
| 1816_9 | 0 | 0 | 224.00 | 3280.00 | 14.64 |
| 1816_10 | 0 | 1 | — | — | — |
| 1816_11 | 0 | 0.5 | — | — | — |
| 1816_12 | 0 | 0 | 110 | 27238 | 247.6 |
| 1816_13 | 0 | 0 | 129.30 | 36344.00 | 281.08 |
| 1816_14 | 0 | 0 | 181.10 | 2262.00 | 12.49 |
| 1816_15 | 0 | 0 | 159.80 | 18449.00 | 115.45 |
| 1816_17 | 0 | 0 | 208.90 | 33758.00 | 161.60 |
| 1816_18 | 0 | 0 | 138.40 | 322538.00 | 2330.48 |
| 1816_19 | 0 | 0 | 180.40 | 107214.00 | 594.31 |
| 1816_20 | 0 | 0 | 299.50 | 279468.00 | 933.12 |
| 1816_21 | 0 | 0 | 203.00 | 16057.00 | 79.10 |
| 1816_28 | 0 | 0 | 141.10 | 10000.00 | 70.87 |
| 1816_30 | 1 | 0.5 | — | — | — |
| 1816_32 | 0 | 0 | 170.80 | 13406.00 | 78.49 |
| 1816_39 | 3 | 3 | — | — | — |
| 1816_40 | 1 | 3 | — | — | — |
| 1816_41 | 0 | 0 | 154.50 | 12106.00 | 78.36 |
| 1816_42 | 0 | 0 | 134.60 | 63672.00 | 473.05 |
| 1816_43 | 0 | 0 | 89.79 | 569489.00 | 6342.45 |
| 1816_51 | 0 | 0 | 239.70 | 9150.00 | 38.17 |
| 1816_52 | 0.5 | 2 | — | — | — |
| 1816_53 | 0 | 0 | 392.80 | 35864.00 | 91.30 |
| 1816_54 | 0 | 1 | — | — | — |
| 1816_55 | 0 | 0 | 209.00 | 7219.00 | 34.54 |
| 1816_58 | 0 | 0 | 259.00 | 23941.00 | 92.44 |
| 1816_60 | 0 | 0 | 167.10 | 67695.00 | 405.12 |
| 1816_61 | 0 | 0 | 165.20 | 22618.00 | 136.91 |
| 1816_63 | 0 | 0 | 263.00 | 19355.00 | 73.59 |
| 1816_64 | 0 | 0 | 127.00 | 5929.00 | 46.69 |
| 1816_65 | 0 | 0 | 99.75 | 36592.00 | 366.84 |
| 1816_66 | 0 | 0 | 351.30 | 3822.00 | 10.88 |
| 1816_67 | 0 | 0 | — | — | — |
| 1816_68 | 0 | 0 | 177.80 | 112276.00 | 631.47 |
| 1816_74 | 0 | 0.5 | — | — | — |

### Example 16: Determination of EC50 values for ATXN3 and KCNB2 in iCell® Glutaneurons

### Materials and Methods:

[0519] Compounds were assessed in an EC50 determination in iCell Glutaneurons including compound 1122_67 and 1122:33. The experimental setup was the same as described in Example 14, except that the following compound concentrations were used (nM): 31.6; 10; 3.2; 1; 0.32; 0.1; 0.03; 0.01 (8-step half-log).

### Results:

[0520] The resulting EC50 values for ATXN3 and KCNB2 as well as the resulting ratio between the EC50 values (KCNB2/ATXN3) are shown in Table 13. From the data generated, it was observed that the compounds showed an increased ratio between the determined EC50 values for KCNB2 and ATXN3 as compared to compound 1122_67. The potency of the compounds on ATXN3 knockdown was relatively maintained for most compounds while it was decreased (higher EC50 value) for all compounds when focusing on the potency on KCNB2 knockdown.

[0521] Based on the data in Table 12 (double point determination) and Table 13 (caspase in vitro toxicity; EC50 for ATXN3 knock down and the ratio between KCNB2 and ATXN3 EC50 values). 23 compounds (shown in Table 14 and in FIG. 12) were selected based on their safety (caspase scores above 0 were discontinued), high potency and efficacy in ATXN3 inhibition, selectivity (i.e., high ratio between KCNB2/ATXN3 EC50 values) as well as their chemical diversity.

[0522] The base sequence, sugar sequence and backbone sequence features of the selected compounds are shown in Table 14, using the HELM-dictionary shown below (see Example 13 for more detailed HELM annotations).

| Base sequence | Sugar sequence | Backbone sequence |
|---|---|---|
| A: (A) | D: [dR] | S: [ssP] |
| C: (C) | F: [fR] | X: [sP] |
| E: (5meC) | L: [LR] | |
| G: (G) | M: [MOE] | |
| T: (T) | O: [mR] | |
| U: (U) | | |

TABLE 14
Selected compounds

| CMPIDNO | Base sequence | Sugar sequence | Backbone sequence | FIG. |
|---|---|---|---|---|
| 1122_91 | AATETTATTUACATCTTEE | LDDLDLDDDODDDDDDLLL | XXXXXXXXXXXXXXXXXX | 12A |
| 1122_107 | AAUETTATTTACATCTTEE | LLOLDDDDDDDDDDDLDLL | XXXXXXXXXXXXXXXXXX | 12B |
| 1122_154 | AATETTATTTACATCTTEE | LDDLDLDDDDDDDDDDLLL | XXXXXXXXXXSXXXXXXX | 12C |
| 1122_155 | AATETTATTTACATCTTEE | LDDLDLDDDDDDDDDDLLL | XXXXXXXXXXXSXXXXXX | 12D |
| 1122_156 | AATETTATTTACATCTTEE | LDDLDLDDDDDDDDDDLLL | XXXXXXXXXXXXSXXXXX | 12E |
| 1122_157 | AATETTATTTACATCTTEE | LDDLDLDDDDDDDDDDLLL | XXXXXXXXXXXXXSXXXX | 12F |
| 1122_158 | AATETTATTTACATCTTEE | LDDLDLDDDDDDDDDDLLL | XXXXXXXXXXXXXSXXXX | 12G |
| 1122_167 | AATETTATTTACATCTTEE | LDDLDLMDDDDDDDDDLLL | XXXXXXXXXXXXXXXXXX | 12H |
| 1122_172 | AATETTATTTACATCTTEE | LDDLDLDDDDDDDDODLLL | XXXXXXXXXXXXXXXXXX | 12I |
| 1122_175 | AATETTATTTACATCTTEE | LDDLDLDDDDODDDDDLLL | XXXXXXXXXXXXXXXXXX | 12J |
| 1122_294 | AATETTATTTACATCTTCE | LDDLDLDDDDDDDDDDLFL | XXXXXXXXXXXXXXXXXX | 12K |
| 1122_296 | AATCTTATTTACATCTTEE | LDDODLDDDDDDDDDDLLL | XXXXXXXXXXXXXXXXXX | 12L |
| 1816_13 | GAATETTATTTACATETT | LLDDLDLLDDDDDDDLLL | XXXXXXXXXXXSXXXXX | 12M |
| 1816_15 | GAATETTATTTACATETT | LLDDLDLLDDDDDDDLLL | XXXXXXXXXXXXXSXXX | 12N |
| 1816_28 | GAATETTATTTACATETT | LLDDLDLFDDDDDDDLLL | XXXXXXXXXXXXXSXXX | 12O |
| 1816_41 | GAATETTATTTACATETT | LLLDLDLLDDDDDDDLLL | XXXXXXXXXXXXXXXXX | 12P |
| 1816_42 | GAATETTATTTACATETT | LLDDLDLLDDDDDDDLML | XXXXXXXXXXXXXXXXX | 12Q |
| 1816_43 | GAATETTATTTACATETT | LLDDLDLLDDDDDDDMLL | XXXXXXXXXXXXXXXXX | 12R |
| 1816_60 | GAATETTATTTACATETT | LLDDLDLODDDDDDDLLL | XXXXXXXXXXXXXXXXX | 12S |
| 1816_61 | GAATETTATTTACATETT | LLODLDLLDDDDDDDLLL | XXXXXXXXXXXXXXXXX | 12T |
| 1816_64 | GAATETTATTTACATCTT | LLDDLDLLDDDDDDDFLL | XXXXXXXXXXXXXXXXX | 12U |
| 1816_65 | GAATETTATTTACATCTT | LLDDLDLLDDDDDDDOLL | XXXXXXXXXXXXXXXXX | 12V |
| 1816_68 | GAATETTATTTACATEUT | LLDDLDLLDDDDDDDLFL | XXXXXXXXXXXXXXXXX | 12W |

TABLE 8B

| | Cortex | | Midbrain | | Cerebellum | | Hippocampus | | Pons/medulla | | Striatum | |
|---|---|---|---|---|---|---|---|---|---|---|---|---|
| | | Max | | Max | | Max | | Max | | Max | | Max |
| | EC50 | efficacy (% | EC50 | efficacy (% | EC50 | efficacy (% | EC50 | efficacy (% | EC50 | efficacy (% | EC50 | efficacy (% |
| Compounds | (nM) | remaining) | (nM) | remaining) | (nM) | remaining) | (nM) | remaining) | (nM) | remaining) | (nM) | remaining) |
| 1856_1 | 251 | 33 | 77 | 20 | 434 | 49 | 202 | 41 | — | 24 | 103 | 27 |
| 1813_1 | 260 | 22 | 93 | 20 | 347 | 47 | 279 | 30 | — | 22 | 89 | 18 |
| 1812_1 | 307 | 52 | 156 | 28 | 603 | 50 | 233 | 35 | — | 26 | 184 | 32 |
| 1809_2 | 134 | 57 | 153 | 34 | 511 | 50 | 111 | 46 | — | 21 | 93 | 29 |
| 1607_1 | 193 | 40 | 89 | 17 | 120 | 42 | 81 | 21 | — | 15 | 63 | 26 |
| 1122_62 | 125 | 56 | 74 | 26 | 226 | 16 | 86 | 46 | — | 19 | 54 | 36 |
| 1122_67 | 125 | 23 | 79 | 14 | 261 | 27 | 146 | 22 | — | 13 | 88 | 19 |
| 1122_33 | 102 | 47 | 38 | 16 | 166 | 35 | 79 | 24 | — | 17 | 63 | 29 |

TABLE 10

| | | Cortex (A1) | | Cerebellum | | Brainstem | | Midbrain | | Striatum | |
|---|---|---|---|---|---|---|---|---|---|---|---|
| | | EC50 | Max KD | EC50 | Max KD | EC50 | Max KD | EC50 | Max KD | EC50 | Max KD |
| Tissue | | (nM) | observed | (nM) | observed | (nM) | observed | (nM) | observed | (nM) | observed |
| 1 week of | 1122_67 | 242 | 88% | 833 | 74% | 196 | 87% | 165 | 89% | 148 | 77% |
| treatment | 1813_1 | 278 | 61% | 966 | 57% | 377 | 85% | 183 | 90% | 118 | 51% |
| | 1100673 | 391 | 67% | 2012 | 48% | 769 | 79% | 279 | 81% | 331 | 69% |
| 4 week of | 1122_67 | 100 | 92% | 365 | 81% | 81 | 93% | 94 | 95% | 46 | 89% |
| treatment | 1813_1 | ND | ND | ND | ND | ND | ND | ND | ND | ND | ND |
| | 1100673 | 199 | 49% | 1229 | 33% | 419 | 72% | 129 | 74% | 130 | 35% |

| | | | | Spinal cord, | | Spinal cord, | | Spinal cord, | |
|---|---|---|---|---|---|---|---|---|---|
| | | Hippocampus | | cervical | | thoracic | | lumbar | |
| | | EC50 | Max KD | EC50 | Max KD | EC50 | Max KD | EC50 | Max KD |
| Tissue | | (nM) | observed | (nM) | observed | (nM) | observed | (nM) | observed |
| 1 week of | 1122_67 | 243 | 75% | 41 | 89% | 39 | 90% | 54 | 89% |
| treatment | 1813_1 | 341 | 63% | 45 | 90% | 36 | 92% | 48 | 91% |
| | 1100673 | 516 | 66% | 83 | 83% | 51 | 83% | 68 | 82% |
| 4 week of | 1122_67 | 89 | 92% | 16 | 93% | Imprecise | 93% | 18 | 93% |
| treatment | 1813_1 | ND | ND | ND | ND | ND | ND | ND | ND |
| | 1100673 | 329 | 52% | 48 | 83% | Imprecise | 84% | 56 | 84% |

TABLE 15
Particular antisense oligonucleotide variants of SEQ ID NO: 1122
Options for nucleobases, sugar modifications and internucleoside linkages for particular antisense
oligonucleotides according to the invention. The options from which the nucleoside at each specific
residue # in SEQ ID NO: 1122 can be chosen is shown in each line indicated by that residue #,
starting from the 5′-end. The selection of a specific nucleobase (“Nucleobase options for residue #”)
and a sugar modification (“Sugar modification options for residue #”) defines the nucleoside at
that residue #. The options for the internucleoside linkage between the nucleoside at a specific
residue # and the next residue, starting from the 5′-end, is shown in the column entitled
“Backbone modification options for internucleoside linkage #”.

| | | | | | | | | | | | | | Sugar | | | | | | | | | | | | Backbone | | | | | | | | | | | |
|---|---|---|---|---|---|---|---|---|---|---|---|---|---|---|---|---|---|---|---|---|---|---|---|---|---|---|---|---|---|---|---|---|---|---|---|---|
| Residue # | Nucleobase options | | | | | | | | | | | | modification options | | | | | | | | | | | | modification options for | | | | | | | | | | | |
| in SEQ ID | for residue # | | | | | | | | | | | | for residue # | | | | | | | | | | | | internucleoside linkage # | | | | | | | | | | | |
| NO: 1122 | A: (A); C: (C); E: (5meC); | | | | | | | | | | | | D: [dR]; F: [fR]; | | | | | | | | | | | | (from 5′-end) | | | | | | | | | | | |
| (from 5′-end) | G: (G); T: (T); U: (U) | | | | | | | | | | | | L: [LR]; M: [MOE]; O: [mR] | | | | | | | | | | | | S: [ssP]; X: [sP] | | | | | | | | | | | |
| 1 | A | A | A | A | A | A | A | A | A | A | A | A | L | L | L | L | L | L | L | L | L | L | L | L | X | X | X | X | X | X | X | X | X | X | X | X |
| 2 | A | A | A | A | A | A | A | A | A | A | A | A | D | L | D | D | D | D | D | D | D | D | D | D | X | X | X | X | X | X | X | X | X | X | X | X |
| 3 | T | U | T | T | T | T | T | T | T | T | T | T | D | O | D | D | D | D | D | D | D | D | D | D | X | X | X | X | X | X | X | X | X | X | X | X |
| 4 | E | E | E | E | E | E | E | E | E | E | E | C | L | L | L | L | L | L | L | L | L | L | L | O | X | X | X | X | X | X | X | X | X | X | X | X |
| 5 | T | T | T | T | T | T | T | T | T | T | T | T | D | D | D | D | D | D | D | D | D | D | D | D | X | X | X | X | X | X | X | X | X | X | X | X |
| 6 | T | T | T | T | T | T | T | T | T | T | T | T | L | D | L | L | L | L | L | L | L | L | L | L | X | X | X | X | X | X | X | X | X | X | X | X |
| 7 | A | A | A | A | A | A | A | A | A | A | A | A | D | D | D | D | D | D | D | M | D | D | D | D | X | X | X | X | X | X | X | X | X | X | X | X |
| 8 | T | T | T | T | T | T | T | T | T | T | T | T | D | D | D | D | D | D | D | D | D | D | D | D | X | X | X | X | X | X | X | X | X | X | X | X |
| 9 | T | T | T | T | T | T | T | T | T | T | T | T | D | D | D | D | D | D | D | D | D | D | D | D | X | X | X | X | X | X | X | X | X | X | X | X |
| 10 | U | T | T | T | T | T | T | T | T | T | T | T | O | D | D | D | D | D | D | D | D | D | D | D | X | X | X | X | X | X | X | X | X | X | X | X |
| 11 | A | A | A | A | A | A | A | A | A | A | A | A | D | D | D | D | D | D | D | D | D | O | D | D | X | X | S | X | X | X | X | X | X | X | X | X |
| 12 | C | C | C | C | C | C | C | C | C | C | C | C | D | D | D | D | D | D | D | D | D | D | D | D | X | X | X | S | X | X | X | X | X | X | X | X |
| 13 | A | A | A | A | A | A | A | A | A | A | A | A | D | D | D | D | D | D | D | D | D | D | D | D | X | X | X | X | S | X | X | X | X | X | X | X |
| 14 | T | T | T | T | T | T | T | T | T | T | T | T | D | D | D | D | D | D | D | D | D | D | D | D | X | X | X | X | X | S | X | X | X | X | X | X |
| 15 | C | C | C | C | C | C | C | C | C | C | C | C | D | D | D | D | D | D | D | D | O | D | D | D | X | X | X | X | X | X | S | X | X | X | X | X |
| 16 | T | T | T | T | T | T | T | T | T | T | T | T | D | L | D | D | D | D | D | D | D | D | D | D | X | X | X | X | X | X | X | X | X | X | X | X |
| 17 | T | T | T | T | T | T | T | T | T | T | T | T | L | D | L | L | L | L | L | L | L | L | L | L | X | X | X | X | X | X | X | X | X | X | X | X |
| 18 | E | E | E | E | E | E | E | E | E | E | C | E | L | L | L | L | L | L | L | L | L | L | F | L | X | X | X | X | X | X | X | X | X | X | X | X |
| 19 | E | E | E | E | E | E | E | E | E | E | E | E | L | L | L | L | L | L | L | L | L | L | L | L | | | | | | | | | | | | |

TABLE 16
Particular antisense oligonucleotide variants of SEQ ID NO: 1816
Options for nucleobases, sugar modifications and internucleoside linkages
for particular antisense oligonucleotides according to the invention.
The options from which the nucleoside at each specific residue # in SEQ ID NO: 1122
can be chosen is shown in each line indicated by that residue #, starting from the 5′-end.
The selection of a specific nucleobase (“Nucleobase options for residue #”) and a sugar modification
(“Sugar modification options for residue #”) defines the nucleoside at that residue #.
The options for the internucleoside linkage between the nucleoside at a specific residue #
and the next residue, starting from the 5′-end, is shown in the column entitled
“Backbone modification options for internucleoside linkage #”.

| | Nucleobase options for | | | | | | | | | | | Sugar modification options | | | | | | | | | | | Backbone modification | | | | | | | | | | |
|---|---|---|---|---|---|---|---|---|---|---|---|---|---|---|---|---|---|---|---|---|---|---|---|---|---|---|---|---|---|---|---|---|---|
| Residue # in | residue # | | | | | | | | | | | for residue # | | | | | | | | | | | options for residue # | | | | | | | | | | |
| SEQ ID NO: 1816 | A: (A); C: (C); E: (5meC); | | | | | | | | | | | D: [dR]; F:[fR]; L: [LR]; | | | | | | | | | | | (from 5′-end) | | | | | | | | | | |
| (from 5′-end) | G: (G); T: (T); U: (U) | | | | | | | | | | | M: [MOE]; O: [mR] | | | | | | | | | | | S: [ssP]; X: [sP] | | | | | | | | | | |
| 1 | G | G | G | G | G | G | G | G | G | G | G | L | L | L | L | L | L | L | L | L | L | L | X | X | X | X | X | X | X | X | X | X | X |
| 2 | A | A | A | A | A | A | A | A | A | A | A | L | L | L | L | L | L | L | L | L | L | L | X | X | X | X | X | X | X | X | X | X | X |
| 3 | A | A | A | A | A | A | A | A | A | A | A | D | D | D | L | D | D | D | O | D | D | D | X | X | X | X | X | X | X | X | X | X | X |
| 4 | T | T | T | T | T | T | T | T | T | T | T | D | D | D | D | D | D | D | D | D | D | D | X | X | X | X | X | X | X | X | X | X | X |
| 5 | E | E | E | E | E | E | E | E | E | E | E | L | L | L | L | L | L | L | L | L | L | L | X | X | X | X | X | X | X | X | X | X | X |
| 6 | T | T | T | T | T | T | T | T | T | T | T | D | D | D | D | D | D | D | D | D | D | D | X | X | X | X | X | X | X | X | X | X | X |
| 7 | T | T | T | T | T | T | T | T | T | T | T | L | L | L | L | L | L | L | L | L | L | L | X | X | X | X | X | X | X | X | X | X | X |
| 8 | A | A | A | A | A | A | A | A | A | A | A | L | L | F | L | L | L | O | L | L | L | L | X | X | X | X | X | X | X | X | X | X | X |
| 9 | T | T | T | T | T | T | T | T | T | T | T | D | D | D | D | D | D | D | D | D | D | D | X | X | X | X | X | X | X | X | X | X | X |
| 10 | T | T | T | T | T | T | T | T | T | T | T | D | D | D | D | D | D | D | D | D | D | D | X | X | X | X | X | X | X | X | X | X | X |
| 11 | T | T | T | T | T | T | T | T | T | T | T | D | D | D | D | D | D | D | D | D | D | D | X | X | X | X | X | X | X | X | X | X | X |
| 12 | A | A | A | A | A | A | A | A | A | A | A | D | D | D | D | D | D | D | D | D | D | D | S | X | X | X | X | X | X | X | X | X | X |
| 13 | C | C | C | C | C | C | C | C | C | C | C | D | D | D | D | D | D | D | D | D | D | D | X | X | X | X | X | X | X | X | X | X | X |
| 14 | A | A | A | A | A | A | A | A | A | A | A | D | D | D | D | D | D | D | D | D | D | D | X | S | X | X | X | X | X | X | X | X | X |
| 15 | T | T | T | T | T | T | T | T | T | T | T | D | D | D | D | D | D | D | D | D | D | D | X | X | X | X | X | X | X | X | X | X | X |
| 16 | E | E | E | E | E | E | E | E | C | C | E | L | L | L | L | L | M | L | L | F | O | L | X | X | X | X | X | X | X | X | X | X | X |
| 17 | T | T | T | T | T | T | T | T | T | T | U | L | L | L | L | M | L | L | L | L | L | F | X | X | X | X | X | X | X | X | X | X | X |
| 18 | T | T | T | T | T | T | T | T | T | T | T | L | L | L | L | L | L | L | L | L | L | L | | | | | | | | | | | |

### Example 17: Transgenic mouse study to assess PK/PD of redesigned compounds

### Materials and Methods:

[0523] The study was largely performed as described in Example 8. In brief, transgenic animals (B6;CBA-Tg(ATXN3*)84.2Cce/IbezJ male and female mice 8 per group (JAX® Mice, The Jackson Laboratory)) of 10-12 weeks of age were included in the study. The animals were injected with 150 μg of compound in 4 μl into the cisterna magna (ICM). The animals were sacrificed after 4 weeks and selected tissues were obtained for evaluation of oligo content as well as knockdown of target transcript. Analysis methods were as described in Example 8.

### Results:

[0524] The results are presented in Table 17 below.

TABLE 17
Efficacy results.

| | Cortex | | Midbrain | | Cerebellum | | Pons/medulla | |
|---|---|---|---|---|---|---|---|---|
| | | Max | | Max | | Max | | Max |
| Compound ID | EC50 | efficacy (% | EC50 | efficacy (% | EC50 | efficacy (% | EC50 | efficacy (% |
| NO | (nM) | remaining) | (nM) | remaining) | (nM) | remaining) | (nM) | remaining) |
| 1122_91 | 894 | 77 | 69 | 52 | 616 | 63 | 134 | 41 |
| 1122_107 | 1385 | 35 | 73 | 20 | 388 | 22 | 95 | 21 |
| 1816_28 | 1791 | 71 | 442 | 62 | 1682 | 79 | 664 | 70 |
| 1816_42 | 8587 | 86 | 14763 | 73 | 1990 | 76 | 598 | 69 |
| 1122_156 | 812 | 69 | 75 | 43 | 330 | 56 | 105 | 40 |
| 1816_65 | 1633 | 73 | 453 | 55 | 1147 | 73 | 1053 | 59 |

*ND Value was not possible to determine due to the available data

[0525] Table 17 shows the readout from the study described in Example 17. An EC50 value was calculated for each compound in each of the obtained brain regions. Also, the maximally obtained target knockdown was highlighted within each group/tissue showing the remaining percentage of target mRNA relative to the saline control group.

[0526] The outcome of the evaluation resulted in compounds with attractive profiles in terms of efficacy and potency, i.e. with a low value for EC50 and a low value in the column for “max efficacy (% remaining)”. A most attractive compound based in these criteria is 1122_107 with best efficacy across all tissues and EC50 values in the lowest half of all the measured values. Another attractive compound based on efficacy and potency is 1122_156.

### Example 18: Comparative transgenic mouse study evaluation of tolerability

### Materials and Methods:

[0527] A further in vivo study was conducted to evaluate tolerability of test compounds. The study was largely performed as described in Example 10. In short, wild type animals (C57BL/6J) of around 7 weeks were included in the study. Animals, all female, arrived from The Jackson Laboratory, Bar Harbor, Me., USA were used. The mice were injected with the compounds via intracisternal (ICM) administration. After a period of 4 weeks, animals were euthanized and selected tissues were collected. The animals were injected with a dose 300 μg compound in WT animals.

[0528] Functional Observation Battery (FOB) scores from the animals were obtained On Day 1 at 1, 4, and 24±2 hours post dosing, then again prior to scheduled termination.

The FOB (functional observation Battery) score

[0529] The FOB score is a non-invasive tool describing various neurobehavioral and activity related parameters.

### Procedure:

[0530] Technicians were blinded to group belongings. Animals were observed for at least 1 minute in their home cage to record scores of the below mentioned parameters. Body temperature was recorded using a rectal thermometer.

[0531] The evaluation, except body temperature, was performed while the animal remained in its home cage; the open-field testing box will not be used.

| | | |
|---|---|---|
| Activity: | Excitability: | Autonomic: |
| Arousal/Alertness | Convulsions | Palpebral |
| Stereotypy | | Closure/Ptosis |
| Posture/Body Carriage | | Erected Fur |
| Neuromuscular: | Physiological: | |
| Gait/Mobility | Respiration | |
| Tremor | Body Temperature | |

[0532] Based on the evaluation of the animals they were scored as being either mild (in same range as saline control group), moderate or severely impacted by the administration of compound.

### Administration of Compound

[0533] Dose Route: Stereotaxic intracerebroventricular (ICV) injection. Dose volume was 10 μl. The dose was administered using a 10 μL Hamilton syringe with attached 22 gauge needle over one injection at a target of 1 μL/sec.

### Results:

[0534] The list of compounds is provided in Table 18 listing the compound ID number, the injected amount of test compound and a rating (mild, moderate or severe) of the in life observations, with mild meaning no or only few signs of adverse events, and severe meaning severe observation in the group with potential of premature takedown of animals in the group.

TABLE 18
Tolerability results.

| | | In life tolerability | No of | Premature |
|---|---|---|---|---|
| Compound ID | Dose | observations | animals* | termination |
| Saline | — | Mild | 6 | 0 |
| 1122_91 | 300 μg | Moderate | 7 | 0 |
| 1122_107 | 300 μg | Moderate | 7 | 0 |
| 1122_172 | 300 μg | Moderate | 7 | 0 |
| 1816_28 | 300 μg | Severe | 3 | 1 |
| 1816_42 | 300 μg | Severe | 3 | 0 |
| 1816_43 | 300 μg | Severe | 3 | 1 |
| 1122_154 | 300 μg | Moderate | 6 | 0 |
| 1122_156 | 300 μg | Mild | 6 | 0 |
| 1813_15 | 300 μg | Severe | 3 | 1 |
| 1605_4 | 300 μg | Mild | 6 | 0 |
| 1816_65 | 300 μg | Severe | 3 | 1 |
| 1605_2 | 300 μg | Mild | 6 | 0 |
| 1816_64 | 300 μg | Severe | 3 | 3 |

*For humane reasons 3 animals were dosed and depending on tolerability additional 3-4 animals were dosed on the following day.

[0535] Compound ID NO: 1813_15 has the following structure (HELM notation):

| | |
|---|---|
| 1813_15 | [LR]([5meC])[sP]•[LR](T)[sP]•[LR](G)[sP]•[dR](T)[sP]•[dR](A)[sP]•[mR](C)[sP]• |
| | [mR](A)[sP]•[dR](C)[sP]•[dR](T)[sP]•[dR](T)[sP]•[dR](T)[sP]•[dR](T)[sP]• |
| | [dR](A)[sP]•[dR](C)[sP]•[dR](A)[sP]•[LR](T)[sP]•[LR](T)[sP]•[LR]([5meC]) |

[0536] From Table 18, different outcomes relating to acute tolerability were observed for the different compounds, with some compounds showing “mild” signs (like the saline group animals) including compound ID NOs 1122_156, 1605_4 and 1605_2, some compounds showing “moderate” signs like compound ID NOs 1122_107 and 1816_64, and other compounds again showing “severe” signs like compound ID NOs 1816_43 and 1816_64.

[0537] A histopathological evaluation (macroscopic and microscopic) of the mice was conducted following termination of the animals. The aim of the evaluation was to identify compound related toxicological events, both of subacute and late onset nature. The evaluation included the pathologist's assessment of possible compound related neuronal changes based and hematoxylin and eosin stains and by Fluoro-Jade stain to assess signs of neuronal degeneration.

### Example 19: In vitro duration of action evaluation of LNA oligonucleotides in a time course, dose range experiment in human iPSC-derived neurons

### Materials and Methods:

[0538] The compounds listed in Table 19 and Table 20 were submitted to an in vitro evaluation of potency and efficacy in a time-course experimental setup. The study was largely performed as described in Example 9, with different time points and compounds.

[0539] The iCell® GlutaNeuron cells were prepared and maintained essentially as described in Example 5 & Table 2. 96-well cell culture plates were coated with Poly-L-Ornithine (0.01%) (Sigma-P4957), 100 μl/well for 4 hours, rinsed 3 times with PBS and coated with Laminin (Roche Diagnostic, 11243217001) 0.5 mg/ml diluted 1:500 in PBS overnight at 4 degrees Celsius. The cells were treated and maintained as per recommendation by the vendor using the provided protocol: iCell® GlutaNeurons, User's Guide, Document ID: X1005, Version 1.2, Cellular Dynamics, Fujifilm; available at https address cdn.stemcell.com/media/files/manual/MADX1005-icell_glutaneurons_users_guide.pdf (accessed on e.g. 10 Nov. 2020). Cells were grown for 7 days before addition of the oligonucleotide. Compounds were added to the cells from pre-dilution plates (compound diluted in PBS) to reach the desired final concentration. The concentrations used were an 8-step halflog with the following concentrations (nM): 31.6; 10; 3.2; 1; 0.32; 0.1; 0.03; 0.01.

[0540] Compounds used are listed in Table 19 and Table 20.

[0541] The following primers were used to assess the level of knockdown of the target mRNA of hATXN3.

Human ATXN3 pre-mRNA using the qPCR assay: custom
design “(ATXN3_exon_8-9(1)”, PrimeTime ® XL qPCR
Assay (IDT).
(SEQ ID NO: 1134)
Probe: 5′/56-FAM/CTCCGCAGG/ZEN/GCT ATTCAGCT AAGT/
31ABkFQ/-3′
(SEQ ID NO: 1135)
Primer 1: 5′-AGT AAGATTTGT ACCTGATGTCTGT-3′
(SEQ ID NO: 1136)
Primer 2: 5′-CATGGAAGATGAGGAAGCAGAT-3′
Human TBP pre-mRNA using the qPCR assay:
“Hs.PT.58v.39858774”, PrimeTime ® XL
qPCR Assay (IDT)
(SEQ ID NO: 1131)
Probe: 5′-/5HEX/TGA TCT TTG/ZEN/CAG TGA CCC AGC
ATC A/3IABkFQ/-3′
(SEQ ID NO: 1132)
Primer 1: 5′-GCT GTT TAA CTT CGC TTC CG-3′
(SEQ ID NO: 1133)
Primer 2: 5′-CAG CAA CTT CCT CAA TTC CTT G-3′

[0542] Cells were harvested at 4 days, 20 days, 29 days, and 40 days after oligo treatment, and RNA extraction and qPCR was performed as described for Example 1, using the ATXN3 primer assay described in Example 5. The relative ATXN3 mRNA expression levels were determined as % of control (medium-treated cells), i.e. the lower the value the larger the inhibition.

### Results:

[0543] The results are shown in Table 19 and Table 20. Table 19 presents the potency of the tested compounds (EC50 value (nM)) over the indicated time points post dosing. Table 20 presents the data as percent remaining ATXN3 mRNA relative to PBS treated cells after dosing with 3.204 compound for the indicated time points post dosing.

TABLE 19
EC50 in hiPSC-derived neurons

EC50 in hiPSC-derived neurons, nM

| CMP ID | Day 4 | Day 20 | Day 29 | Day 40 |
|---|---|---|---|---|
| 1122_154 | 56.5 | 42.4 | 89.3 | 314.4 |
| 1122_156 | 53.2 | 33.4 | 50.1 | 88.7 |
| 1816_28 | 128.4 | 653.3 | 926.1 | 1465.0 |
| 1605_4 | 76.7 | 33.6 | 47.3 | 71.8 |
| 1816_65 | 70.9 | 51.0 | 184.2 | 692.3 |
| 1122_91 | 115.5 | 76.9 | 171.6 | 748.0 |
| 1122_107 | 74.6 | 20.7 | 19.0 | 35.1 |
| 1122_172 | 66.1 | 50.1 | 90.4 | 306.1 |
| 1816_42 | 196.0 | 262.0 | 546.3 | 830.7 |
| 1816_43 | 97.2 | 68.5 | 136.1 | 709.8 |
| Negative control | ND | ND | ND | ND |

*ND Value was not possible to determine due to the available data

[0544] The calculated EC50 values for each compound for each of the time points are shown in Table 19. From the data it can be seen that there was a wide range of obtained EC50 values for the different compounds at the different time points. Generally there were some compounds showing high EC50 values indicating a low potency which also decreases (higher value) over time. Examples of these are compound ID NOs 1816_28, and 1122_172. On the other hand, there were also compounds which maintained a high potency (low value for EC50) over the duration of 40 days, showing EC50 values below 100 nM. Examples of these compounds are compound ID NOs 1122_156, 1605_4 and 1122_107. A low EC50 value is a beneficial property of a compound because it indicates that a lower amount of compound is required to elicit an effect.

TABLE 20
Efficacy in hiPSC-derived neurons following
addition of 3.2 μM compound.

| | % remaining transcript in hiPSC-derived neurons | | | |
|---|---|---|---|---|
| | after treatment with 3.2 μM compound | | | |
| CMP ID | Day 4 | Day 20 | Day 29 | Day 40 |
| 1122_154 | 6.3 | 4.4 | 11.5 | 19.0 |
| 1122_156 | 6.8 | 5.0 | 7.8 | 16.0 |
| 1816_28 | 13.2 | 29.6 | 32.3 | 50.5 |
| 1605_4 | 8.7 | 3.3 | 2.9 | 4.5 |
| 1816_65 | 7.5 | 8.2 | 13.1 | 22.7 |
| 1122_91 | 10.5 | 8.0 | 15.5 | 32.5 |
| 1122_107 | 8.3 | 4.5 | 4.3 | 6.0 |
| 1122_172 | 7.1 | 4.8 | 8.2 | 22.0 |
| 1816_42 | 9.8 | 15.2 | 23.6 | 46.3 |
| 1816_43 | 7.1 | 7.8 | 9.8 | 20.9 |
| Negative control | 93.5 | 95.1 | 94.1 | 115.8 |

[0545] Table 20 show the observed levels of remaining mRNA (% remaining transcript compared to PBS control) in the cells following a treatment of the cells with 3.204 of compound as described above. The evaluation was performed at multiple time points after compound addition. From the table it is clear that many of the compounds were able to maintain a suppression of the level of mRNA over the duration of 40 days following a single exposure to compound. A number of compounds were able to maintain a suppression of more than 90% for the duration of 40 days such as compound ID NOs 1605_4 and 1122_107. Furthermore, compound ID NO 1122_156 showed a high level of knockdown for the duration of 40 days. A high level of knockdown over a long period indicates a long duration of action and potential for a more infrequent administration.

### Example 20: In vivo assessment in transgenic animals of efficacy and duration of action

### Materials and Methods:

[0546] A further in vivo study was performed using compound ID NOs 1605_4, 1122_107 and 1122_156. The study used male and female B6;CBA-Tg(ATXN3*)84.2Cce/IbezJ mice with the compounds administered via intra cisterna magna (ICM) administration. At three time points after compound administration, 4, 8 and 11 weeks, animals were euthanized and terminal plasma samples and tissues were collected.

### Animal Care

[0547] In vivo activity and tolerability of the compounds were tested in 62 B6;CBATg(ATXN3*)84.2Cce/IbezJ male and female mice (JAX® Mice, The Jackson Laboratory) at the age of 10 weeks. Following arrival, animals were housed in groups up to 5 in individually vented cages (IVC, 38×22×15 cm) in a temperature (22±2° C.) and humidity (55±15%) controlled environment on a 12 hour light cycle (07.00-19.00 h). Males and females were kept in separate cages. Standard diet (SDS Diets, RM1 PL) and domestic quality mains water were available ad libitum. If required, animals received soaked chow and/or Royal Canin in addition to standard diet as part of pamper care. The experiments were conducted in strict accordance with the Guide for the Care and Use of Laboratory Animals (National Research Council 2011) and were in accordance with European Union directive 2010/63 and the Dutch law.

Administration Route-Intra-cisterna Magna injections.

[0548] The compounds were administered to mice by intra cisterna magna (ICM) injections. Mice were anesthetized using isoflurane (2.5-3% and 500 mL/min 02). Before surgery, Finadyne (1 mg/kg, s.c.) was administered for analgesia during surgery and the post-surgical recovery period. A mixture of bupivacaine and epinephrine was applied to the incision site and periost of the skull for local analgesia. Animals were placed in a stereotaxic frame (Kopf instruments, USA) and an incision made at the back of the head towards the neck. Then, the skin was spread and the coordinates marked prior to drilling a hole in the occipital bone of the skull, where a cannula was placed. Next, the compounds were injected into the cisterna magna (ICM). A volume of 10 μL of the assigned test item was injected over 30 seconds. After injection, the needle and cannula were held in place for 30 seconds to ensure no back flow occurred. The cannula was then retracted, the hole was covered with skin and the incision was closed by sutures. Animals were placed in a warm environment until recovered from the procedure. The compounds were administered as a single dose as listed in Table 21. Each group contained 4-6 animals.

TABLE 21
Treatment regimes.

| | Dose of compound in 10 μl | Weeks of |
|---|---|---|
| Compound ID NO | volume | treatment |
| 0.9% Saline | — | 4 |
| 1605_4 | 20 μg/μl equals 200 μg | 4, 8, 11 |
| | compound | |
| 1122_107 | 20 μg/μl equals 200 μg | 4, 8, 11 |
| | compound | |
| 1122_156 | 20 μg/μl equals 200 μg | 4, 8,11 |
| | compound | |

[0549] At the end of the experiment, after week 4, 8 and 11, the animals were euthanized by Euthasol® overdose. Terminal plasma was collected in Li-Hep tubes. Terminal tissues were harvested from the animals and were dissected on a chilled surface. Half of the tissue samples were stored in 2.0 mL Safe-Lock tubes, PCR clean, pre-weighted and precooled. Immediately after collection, samples were weighed and flash frozen in liquid N2 prior to storage at −80° C. The other half was fixed in 4% PFA for 72 hours and subsequently transferred to 70% ethanol awaiting shipment. Tissue dissection and collection was performed, collecting tissue from a range of tissues: Cortex, Cerebellum, Brainstem, Midbrain and Striatum. There were no signs of acute toxicity of any of the administered compounds and hence no premature termination of animals due to compound related toxicity.

[0550] Analysis of in vivo samples: Description of tissue preparation for content measurement and qPCR was performed as per Example 8. The median knockdown of target mRNA achieved was recorded as percent remaining target transcript relative to saline control group—this data is provided in Table 22.

### Results:

TABLE 22
Knock down data for each compound for each time point.

| | | Cortex | Cerebellum | Brainstem | Midbrain | Striatum |
|---|---|---|---|---|---|---|
| | | Median KD | Median KD | Median KD | Median KD | Median KD |
| | | (% remaining | (% remaining | (% remaining | (% remaining | (% remaining |
| Tissue | | transcript) | transcript) | transcript) | transcript) | transcript) |
| 4 week of | 1605_4 - 200 μg | 19 | 34 | 8 | 5 | 34 |
| treatment | 1122_107 - 200 μg | 35 | 31 | 14 | 8 | 41 |
| | 1122_156 - 200 μg | 53 | 44 | 16 | 12 | 53 |
| 8 week of | 1605_4 - 200 μg | 56 | 41 | 22 | 12 | 67 |
| treatment | 1122_107 - 200 μg | 43 | 30 | 25 | 17 | 33 |
| | 1122_156 - 200 μg | 76 | 46 | 46 | 38 | 72 |
| 11 week of | 1605_4 - 200 μg | 65 | 50 | 38 | 21 | 73 |
| treatment | 1122_107 - 200 μg | 82 | 41 | 46 | 39 | 75 |
| | 1122_156 - 200 μg | 99 | 70 | 70 | 75 | 100 |

[0552] Overall. it can be seen that the brainstem and the midbrain were the brain areas targeted most efficiently across all compounds when focusing on knock down efficacy.

### Example 21: WT and polyQ Ataxin 3 protein levels in human SCA3 patient derived fibroblasts treated with selected oligonucleotides (ASO)

### Materials and Methods:

[0553] Reference compounds 1287095 and 1102579 referred to in this Example correspond to the oligonucleotides disclosed as Compound No. 1287095 in WO2020/172559 A1 and Compound No. 1102579 in WO2019/217708 respectively.

[0554] This experiment was performed to investigate the efficacy of knock down of the tested antisense oligonucleotides. The study was largely performed as described in Example 12.

[0555] The evaluation was performed in the SCA3 patient derived fibroblasts, allowing for an assessment of the efficacy on the disease causing ataxin3 allele and the ataxin3 WT allele.

[0556] The cell line used for the ASO treatment was human SCA3 patient derived fibroblasts (GM06153—Coriell Institute). Twenty thousand cells were seeded per well in a 24 well plate with a total volume of 1 ml. ASOs were added immediately after to a final concentration of 5 μM (gymnotic uptake). After 4 days of incubation, cells were washed twice with PBS, and harvested in 50 μl LDS sample buffer (NuPAGE, Thermo Scientific) with addition of 50 mM fresh DTT.

[0557] Western blots were performed on the capillary-based immunoassay platform (WES, ProteinSimple) using a WES 12-230 kDa Wes Separation Module. Cell lysates were diluted 10×in Sample load buffer (ProteinSimple) prior to loading on the cartridge. Primary antibody for Ataxin 3 (rabbit monoclonal antibody, prod. #702788 from Invitrogen) and for HPRT (rabbit monoclonal antibody, cat. #Ab109021 from Abcam). Both antibodies were used in 1/100 dilutions. Goat anti-rabbit HRP conjugate (Part. #DM-001, ProteinSimple) was used as secondary antibody.

[0558] Compass software (ProteinSimple) was for quantification of the protein bands.

### Results:

[0559] Ataxin 3 antibody recognized both isoforms, and the intensity (area under peak) was normalized to the protein input based on the signal from HPRT. The raw data are shown in FIGS. 13 and 14, and are quantified as described in FIG. 15.

[0560] Difference between allele selectivity was evaluated using an ordinary t-test, (unpaired, two-tailed, homoscedastic, calculated using Microsoft Excel, 2016, version 160.5227.1000) for each compound comparing the level of each detected allele. A difference (α=0.05) was observed for compound ID NOs 1287095 and 1122_156.

[0561] The effect on protein knock down was evaluated for each allele (e.g. wild type and polyQ expanded allele, individually) and compared to the negative control using an ordinary one-way ANOVA test with Dunnett correction for multiple testing (Calculated using GraphPad Prism, version 8.4.2 (679)). Some level of a decrease in protein from both WT and polyQ allele was observed for all compounds except for compound ID NO 1287095, where no decrease was observed for either allele using an effective concentration of compound of 504.

[0562] In summary it can be observed in FIGS. 13 to 15 that compound ID NOs 1605_2, 1605_4, 1122_107 and 1122_156 effectively induce a knockdown of target protein—both wild type and polyQ expanded version—and that compound ID NO 1122_156 additionally has a statically significant increased effect on the polyQ expanded allele. A higher activity on the disease causing polyQ extended Ataxin 3 than the WT Ataxin 3 is preferable as it allows a selective reduction of the disease causing allele. The reference compounds 1287095 and 1102579 did not induce a significant reduction of either of the versions of the target protein under the tested conditions.

[0563] This experimental setup also measured the resulting effect on mRNA level following treatment with the compounds shown in FIG. 15. The data are not shown, but the analysis was performed exactly as described in Example 22. The effect of the compounds on the ATXN3 mRNA level followed the same pattern as did the protein levels. This means that when a high level of protein knock down was observed, there was also observed a high level of mRNA knock down and vice versa, as shown in Example 22.

### Example 22: Knock down of WT Ataxin 3 protein levels in human SK-N-AS cell line treated with selected oligonucleotides (ASO)

### Materials and Methods:

[0564] This experiment was performed to investigate the efficacy of efficacy of knock down of the tested antisense oligonucleotides. The evaluation was performed in SK-N-AS cells (cell line listed in Table 2), allowing for an assessment of the efficacy on ataxin3 alleles and related protein production. Twenty five thousand cells were seeded per well in a 24 well plate with a total volume of 500 μl. In three replicate wells, ASOs were added immediately after to a final concentration of 5 μM (gymnotic uptake). The reference compounds 1287095 and 1102579 were additionally tested in a concentration of 15 μM. After 4 days of incubation, cells were washed twice with PBS, and harvested in 100 μl LDS sample buffer (NuPAGE, Thermo Scientific) with addition of 50 mM fresh DTT. Western blots were performed on the capillary-based immunoassay platform (WES, ProteinSimple) using a WES 12-230 kDa Wes Separation Module. Cell lysate were diluted 10× in Sample load buffer (ProteinSimple) prior loading on the cartridge. Primary antibody for Ataxin 3 (rabbit monoclonal antibody, prod. #702788 from Invitrogen) and for HPRT (rabbit monoclonal antibody, cat. #Ab109021 from Abcam). Both antibodies were used in 1/100 dilutions. Goat anti-rabbit HRP conjugate (Part. #DM-001, ProteinSimple) was used as secondary antibody.

[0565] Compass software (ProteinSimple) was for quantification of the protein bands.

[0566] The effects of the above mentioned compounds were also evaluated on transcript level by digital droplet PCR (ddPCR) analysis in a similar setup. Cells were treated similarly to the cells used for protein determination with respect to compound concentrations and time points. The SK-N-AS cell line was used for the ASO treatment, with 10.000 cells seeded per well in a 96 well plate with a total volume of 0.1 ml. ASOs were added immediately after to a final concentration of 5 μM and for compounds 1287095 and 1102579 also with 15 μM (gymnotic uptake). After 4 days of incubation, cells were washed twice with PBS, and harvested in 200 μl RIPA buffer (Thermo Scientific, Pierce). The purified RNA was denatured before cDNA synthesis. cDNA was created using the iScript Advanced cDNA Synthesis Kit for RT-qPCR (Biorad) according to the manufacturer's instructions. Measurements of the expression levels of the target genes was done by droplet digital PCR using the QX200 droplet system (Bio-Rad) together with the QX200 software standard edition.

[0567] The following assays were used for the analysis:

qPCR probe and primers set:
PrimeTime ® XL qPCR Assay (IDT)-
ATXN3_exon_8-9(1)
(SEQ ID NO: 1134)
Probe: 5′-/56-FAM/CTCCGCAGG/ZEN/GCT ATTCAGCT
AAGT/31ABkFQ/-3′
(SEQ ID NO: 1135)
Primer 1: 5′-AGT AAGATTTGT ACCTGATGTCTGT-3′
(SEQ ID NO: 1136)
Primer 2: 5′-CATGGAAGATGAGGAAGCAGAT-3′
Reference gene was hHPRT
PrimeTime ® XL qPCR Assay (IDT)-
Hs.PT.58v.45621572
(SEQ ID NO: 1993)
Probe: 5′-/5HEX/AGCCTAAGA/ZEN/TGAGAGTTCAAGTTGAGTT
TGG/3IABkFQ/-3′
(SEQ ID NO: 1994)
Primer 1: 5′-GCGATGTCAATAGGACTCCAG-3′
(SEQ ID NO: 1995)
Primer 2: 5′-TTGTTGTAGGATATGCCCTTGA-3′

[0568] The resulting evaluation of the remaining mRNA level following compound treatment is presented in FIG. 19.

### Results:

[0569] Ataxin 3 antibody recognizes the wild type Ataxin 3 protein expressed by the cells, and the intensity (area under peak) was normalized to the protein input based on the signal from HPRT. The raw data are shown in FIG. 16 and FIG. 17 (Reference compounds including negative and positive controls), and the quantification is shown in graphical format in FIG. 18.

[0570] The effect on protein knock down for each of the tested compounds was evaluated by comparison to the negative PBS control using an ordinary one-way ANOVA test with Dunnett correction for multiple testing (Calculated using GraphPad Prism, version 8.4.2 (679)). A decrease in protein levels were observed for all compounds with p-value<0.001 compared to PCR control samples. From the raw WES data (FIG. 16 and FIG. 17) and the quantification (FIG. 18) it is clear that there are pronounced differences in the level of protein knock down between the compounds. The compounds 1605_2, 1605_4, 1122_107 and 1122_156 were very efficacious in knocking down Ataxin 3 protein using the effective concentrations of 504. The reference compounds 1287095 and 1102579 were both less efficacious. Reference compounds 1287095 and 1102579 were unable to induce the same level of effect (level of protein knockdown) as the best performing compounds even when used in a disadvantageously high concentration (15 μM, 3 times higher than the other respective doses of 5 μM).

[0571] FIG. 19 shows the efficacy of the compounds with the listed applied concentrations in terms of knockdown of the ATXN3 encoding transcript. The mRNA knock down follows the same pattern as observed for the protein quantification shown in FIG. 18. Again it is observed that the compound ID NOs 1605_2, 1605_4, 1122_107 and 1122_156 are more efficacious at reducing ATXN3 mRNA levels compared to compounds 1287095 and 1102579. Again, a three times higher applied concentration of compounds 1287095 and 1102579 still did not obtain a level of efficacy which was as high as that of the best performing compounds.

The application's sequence listing, which the Patent Office published only in electronic form, follows.

SEQUENCE LISTING (1995 sequences)

SEQ ID NO: 1 - DNA, 62130 bp, hsapiens
ggaggagaggggcagggggcggagctggagggggtggttcggcgtgggggccgttggctccagacaaataaacatggagtccatcttccacgagaaagtgagtgtccgcgttcggtggggagctgtctgccgcgcggtggcgggcgtggagcgcggcatcaccgcctctcggagggctgggtggggcccgagtcgcccccatgccgatctcgcccggcgaggggcgacgccgcagcctcccgcctcctcggctcgaggaggggagcatcacctacgcccctacttcccccgcggcccccgccctgggagccgggagggagtatgggcggggccgggggcgtctcgggacacgggagtggggtggcgcccagtgggtttgcttctgcctttctccgtcactttccatcgcttttcggaggattccttcacccctccccaatccttccctctccctagggtctagctagagtcatctctgggacacctccctcaacccctcctaccctaatcctggcagaattaacttttcctcctccggactgctcaattctatattggagtcttccctacacgtagatctttggggtcttgttcgtgtctttcccctgcactaggtccgcgagcctcccgagggaggagaccttggctcgcccactgtagggcctgacatttaggaagtgaagtaggaaacccggcgtgcccctaaacagggaagtcgtcacaagagtttttattacgggatgtttgggtttggtttcttttggtactcccatctttccggagcaggcggccagctttgtttttaggtattaggagtggactgggatgattttgttgtagtctgcctagcctgctgtccctttaactcttccgtgaccatgcacttgaagatactgtttgtgatatgtaaagaaactcctcgtttctctcatactattatccagccatttgtgtgtgagtgaagccttccccaggacagctttggcacatggtatcatgtttcataatagtttcgtgtttggaaagagttgctggtaaggctgttatttaataggaggagcaaagggtttttgttttattaaatacttataaatgatcatttatcccagacatttaaaattcacacacacacaacaaataaagcaaagacaaaagaatacatttaccaaatgtaaatctgtagcataaattttttttaatttttattttaaagatggggtctcattctgtcacccaggcaggtgtgcaatggagagatcatggctcactgcagccttgatctcctaggcacaagcgatcctcccgcctctgcctccagagtagctgggactacaggtgcatatcgccagggccaggtaatgtttttgggagagacggggtctcgctgtgttgcccaggctggtctcgaactcctggactcaggtgattctcccacctcggcctctcgaagtgctgtgattacaggcgtgagccactgtgcctggaacaaattgttaagtacaatgcttttcattgtagaaaacatctcggaaacttttgaaataggctgatgttcagtgggggaggaaggactcagtcgtatagttgtcactaattttttgacttgattgacatgactcgtaaatcatagacaatagagatttggttgcttggctgagtagagtgcgtgaaaaatacacacgtacttttttttttttttttttgagatggagtttggctcttgtcacccaggctggagtgcaatggcgccatcatggctcactgcaacctccgcctccccgttcaagcgattctcctgcctcagtctccccagtagctgagattacaggcgcccgccaccacgcccagctaatttttgtatttttagtagagacagggtttcaccatgttggccaggctggtctccaactcctgacaggtggtccgcccgcctcggcctcccaaagtgctgggattacaggcgtgagccaccgcacccggccatatttttgttattaattttcaaaggctttggtgtgggaccacatttcaacatggaaggccttaaacatgttccacactacttcctgagaattagacaagatttttaacaatattgttacctagttgggacacatttgtactgacccatgggatgaaaaaaagctgagtgctagcctagtgaaaatctacttacccgaaagaaatccctcttagtctgggtgcagtggctcacaccagtgctttgggaggcccagacgggcggatcatgaggtcagtagtttgagaccagcctggccaacatggtgaaaccccgtctctactaaaaatacaaaaaattagccaggtgtggtggcaggcgcctgtaatcccaggtactctggaggctgaggcaggagaattgcttgaacccgagaggcagaggttgcagtgagccgagaccgtgccactgcacttcagcctgggcaacagagcgagactccgtctcaaaaaaaagaaaaggaaaaaagagtccctcttaattatcagcatgtgtataggcctacagatacttcaggaatacctttaccattatcatcaacttgtatctacatagcatgtgaagattcaacaatttagttttttgggcgtcctcaagagtacgcacctataaccatatggcccaattgttaatctcctatacagtccattctgggaatgtttgggcttactgtgccatttttccgttcactgccttcccctctgcaatatacctttaacccttgctaggtcctgggtttggagagccagagaaccaactttggccctaaagaagctgtgtaggtagcaatatctgcctacgaagggccttgcaaccatttcctcttggaaccttggtttcctctttctgagtagtcactttgagtaccctttattaagttagaatgtaaaaacagtttctcactgatatatctgcagtgcctgagagagggcctggcacagagtaagtactcaataaatatttgaatggggccgggcgtggtgagacctgtctctacaagaatgaacaaaattagctgggcgtgttagcacatgcctgtagacttgggaggctgaggtgggaggattgcatgagtctgggaggtcgaggctgtagtgagccatgatcgcaccactgcactccagcctaggggacagagcaagatcctgtctcaaaagaaaaaaatgtatatatttgaatggataaagagatggctttgagtttctgagatatatatggtgctgtttatctaaagtaaacaagttttctgtaaatattttaaggctttgcaggccagctgtagtctctgtcacacattcttatttgtgcatgtttttcccaaccatgtaaaaatgtaaagtgcattcttagctactggggcaggttgaatttggcccatgggctagagtttgccaacccctaacttaaacctttgtactaactttatgaccactactggatttttgttgttgtttgttttagttctggtgcctgctttgtttttttttttttttttaatcctcttgctgatgtttcttggtgcagttactgtgccatttgtattggtgcttttaatgtaatgcaaactggtaataatatctaaacttgctggggttgtacataaaattattgaaaagattgaaaagatgctgagcattgactctgtggcattcattatgcccttttgtgattgctggattttagccatctttaggacatttgagctttaggagaagccaaattctgtataaatgacttgaagtgctaatagcacaggttttgaaacctctgcctgggtttgagtctcagctctgccttttactacctgtgtgatcctgagcaagttacttagtatccctgtcctctagtttcctcctctgtagtgtggggataataacatagacataacctgagagttagagtgtagagaaggctccctggcagatagtgctgtagaagtactggccattgccattactcaggtgcttgtgtttgctgaacctcatagtaagggctcggagagcactaagaggaggtgagaaatgctgctagattgacagcttgtccccagatagcccattcccgagagcaccttaggtttatacctgatttgtgttgtagttagtagtgtctctggtaatttgaactagtttcaggttggtcttgaaaacctggggaggttgggggtaaatgatttggtagcagttctcttttgtgattttatacattatctttgtagaactgcagtttgctaattctctgagcccaacacaatgaagtctgggcctaaaatcatagaatttcttttatttttttttttgtttttaatttatttattccctccctccctcctttcttcctttcttccttttctttctttctttccttccttccttccttctttcttttctttctttcttttctttctttggagtctcactctgtcaccaggctggagtgcagtggcacgaactttcttcagagtctcactttgtcaccaggctggagtgcagtggcgcgaactcagctcactgcaacctccgtctcctgagttcaagagattctcctgcctcagcctcccgagtagctgggactataggcatgtgccaccatgcccagctaattttcttatttttagtagagacgaggtttcaccatgttggccaggatggtcttgatctcttgacctcgtgatccacctgcctcagcctcccaaagtgcggggattacaggcgtgagctaccacgcccagcctattttttattttttgaggcagagtctcactctgtcacccaggctggagtgcagtggtgcaatctcagctcactgcaacctccgcctcctgggttcaggtgattctcctgccttagcctcctgagcacctgggactacaggcgcctgccaccacacctggctaattcttatatttttagtagaggcggggtttcaccatgttggccaggctggtctcgaactcctgatctcaagtgatcaacctgccttggcctcccaaagtgctggaattacagccatgagccaccatgcccagccaaatcatgagatttcaataccgctgaactttgattatggcaaagtgaacttctgctttgattaaagcttgatgagagaggtggctggggatagtttgagataagggcaaggcaggaaaatgcataatcttacgtgggctcattgtcattgtacaattcttttggtccatgtggaatttgatccgtcctatgacttaagttatgtttatttttgtttttatttttatttattttgtgtctttttgagagacatgatgttgctctgtcacctgggccagaatacagtggcacaatcttagctccgtgtagccttgaactcctgggctcaagtgatcctcccacctcagcccctcaaacagttgagattatagtatgaaccactgtgcctagccttaagtgatttttaaatttgtactgaacagtttgtcctttccttccattaaatcatattagaagtacagaacttgatatttcctgtagcaatacagtttttctttgatgaagtttgatttcaagtacttatttttcataatttaaagctattttttatagagagaattttaatcaaatatttggatgtcactattgctatatatggtattaagtatggtgaccatagtttgtaaactccaaactgacagcaagacaggaaatttgtgttagcaaaggcttttttcttactgtttgaattttttaaaaattagatacaatacagagaggagcacacaaatcattaagagtacagctcagcgaattttcacacagtgaacatgtgtaaacagcaagtaacaaaagatttacctgcatcctataacctcccattattcccttttctaggtactgtctctccactgcattcccaccaaatataaccactatgctgaattctgacatcataaatgagttttgcctgattttgagcttttgtgactggaagtgtacagtgtatataccctttcgattctgtcctctttagtttaccattgtttgagaaatttatccatactgttccagaattaactactgttaattattgttaattaactactgttgtagttaattcatcctcattgttatctagtattcttttgtgagtaaacacaatttccattctactgtgatcccagctatccatttgggtcgtttccagtttggggtccattacaaatagtaatgctatctgtaatgctattttgtattactacaaatagtaatgctatttgtggcacaaaaatactgcttttgtgaacattcttatacatgtcttttgatgaatgtatgtttgcattgctgttgtttacattatgtacctagtaatggaattgctagatcataggagatgtatatattaagctttagtggatgcattacataattattagttattattggttataccaatttatcctctcatcagtagtatacaacagtttctgtatctctaatctccaacattttagccattttagagtttgtgtactaacacattgtggttttaatttacatttccctgatgactaataaagttgagtacctcttttgtgttctttatagccatttgactgtcttgtgaagtgcttgtttgtcttgcctatttttcttttctttctttctttttcttccttccttcctttctttctttcttctttctttccttccttcttttctttctttctgtctttctttcttgtctttcttgtctttctgtctttcttggtcttgccctgtcacccatgctggagtgcagtggtgcagtctcagcttactgtagcctcgacctttttggggctcaagttatcctcctttctcagcctcccaagaagctggactacaagcacgcaccaccatgctcagttaattttttattttttgtagaaatggggtttcaccatgttgtccaggctggtctcaaacttctgggctcaagtaatcctcctgccttggcctcccaaaatgctgggattacaggcatgagccaccgcagccagccttggctatttttcaaaaggatataagtagaacatctgtatatcccttcaatttgcatattattcagtaagagttgcactctggtagtagaaatatataaggaggagaaagaagtggaaacaaaaagtctattctcatgagaagacttgggggatagtgttctctctagctccaagctacttattccttacgaaaagttgaagataaacttatctcagactgaggctgtctcaatgttgtcttcctattccattatacacatataacccatatttttttcaccagctgaattttgctcctagaaaattgattcatcaggaaaaatatccgtcttgcaaggtggttctctttagagtctgctgtgtgacatagctcaggacaaattgtgtgatgtcagataggttgggttaaggaatagaccttattggggaaagagagaacttggagggccaaggttagcaggagaaggaaatgttctctcatctgccgtcaattcagggaggggcaaacctggtgtctgtgttcacagggagggatccatccatctgtgattctcccttcttatcaggtagcatgggaaagctacactgttgcggggaggagggtcacacgcaggctacttagtaccaggcaccctggacttggattcaggttgccagttgtgtgagaaactgcccagcacctgaaggccctgaacccatgagaagttgtacctacctcccatgaggaggaatcctgtcatcccatgggagctgagcttgggtgcagtccctcttgctggcttgtccaggagtgagctccagggttgtttgggacagttctgctcattgctttacactgtgtatacattatctgtagagttccatgaagagaacttcagcactgtaactgcaagttttaacatggaacagaatttttctcacctgtattaattcttaagatttgaagttctatcaacaagcatttagattgtgtggagatttttttatttttatttttggagacagagtcttgctctgttacccagactggagtggcagtggcatggtcttggctcactgcaggctctacttcctgggttcaagcgattctcatgcctcagtgtcctgattagctaggactacaggtacacaccaccatgctggctaatttttgtatttttagtagagacgaggtttcaccgtattggtcaggctggtctcgaactcccagcctcaagcagtccacccacctcggcctcccaaactgctgggattacaggtgtgagccaccatgcttgactgacatcatcatgttaaaagaataaatgttctagggagctgggcacagtgtcatgtttctgtagttctagctgctcgggaggctgaggcaggaagatcccttgagccctggagttcaagtccagcctgggcaacatagtgagatctctttttttaaataaataaataactgttctagggactaaaatttcctttcaccattagtaatttactgtagaatctccaagaatgaacttattttaggtactgaaaatgagggagactaaatgttttatacagtagtttttagtaaaatatgagatttgatgcatttgatagatgatgtttgtttaaaataattcttaaatttttgatcatgtaattatagtttcattaatggtagatttgtaaaataaatgttaccaaatgaaaatgcatgtacctatgttaattatccttatctaaagctgaaagttcagttcaactatgttaaaacatagtaggggcctggcagggtggctcttgcctgtaatcccagaacttagggaggccaaggtgggcagatcacgaggtcaggagatcgagaccatcctggctaacattgtgaaaccgtatcgctactaaaaatacaaaaaattagccgggcatggcggtgggcacctgtagtcgcagctacttggtaggctgaggcaggagaatggcgtgaactcaggaggcagagcttacagtgagccgagatcatgccactgcactccaggctgggtgacagagcaagactccatctcaaaaaaaaaaaaaaagttggccaggtgtggcggctcacacctgtaatcccagcacttttggaggccgaggcaggcggatcacaagatcaggagtttgagaccagcctggctaacagagtgaaaccctgtatatactaaaaatacaaaaattagccaggcatggtggtgcatgcctgtagtcccagctacttgagaggctgaggcaggagaatcacttgaacccgggaggcggaggttgtggtaagctgagattgctccactgcactccagcctggacaacagagcaagactctgtctcaaaaaaaaaaaaaattaatgattaaattatttaggggagccgggcgcagtggctcacgcctgtaatcccagcactttgggaggccaaggcgggcggatcacgaggtcaggagatcaagaccatcctggctaacacaggatgaaaccccgtctctactaaaaatacaaaaatttagccgggcgtggtggcgggtgcctgtagtaccagctactcgggaggctgaggcaggagaatggcatgaacccgggtggcggagcttgcagtgagccaagatagcgccactgcactccggcctgggtgaaagagtgagactccgtctcaaaaaaaaaaaaaaattatttaggggaagatactatacaattctgtttaacaagtcacattttaattttttcttttggaaatattagcaagaaggctcactttgtgctcaacattgcctgaataacttattgcaaggagaatattttagccctgtggaattatcctcaattgcacatcagctggatgaggaggagaggatgagaatggcagaaggaggagttactagtgaagattatcgcacgtttttacaggtactgattttaaactcactaagtcacatttcttttttttttttttttttgagacggagtctcgccctgttgcccatgctggagtgcaatggcgcgatctcggctcactgcaacctctgcctcccgggttcaagcgattctcctgcctcagcctcccaagtagctgggattacaggcacacggcactatgcccggctaattttttgtatctttgttagagatggggtttcaccatgttggtcaggttggtctcaaactcctgaccttatgatccacctgtcttggcctcccaaagtgctgggattataggtgtgagccaccacacccggcttacatttcttttaaaaatgtggataccatttagaaaaggatgggccattcttcctatagggatctgactggtgaattataactgtgctgttaactttggaaatgggaatgcacaagatattgttttaaatatgcacgctaatgacagtttgtatccttctttccccacccccacccttgcttcaactacctgtcaaaattaacagcagccttctggaaatatggatgacagtggttttttctctattcaggtaagtagtcacaagcatgtactatgtgttgcttacatcccaggcaccgtttcacagcctttcaatagtcactgtaacaaggcgaccttcggaagttcttctgtctacagagtatagattatactctagagtactagattttttttttcttgagacagagtctcgttctgtcacctaggctggagtgcagtggcgtgatcttggctcactgtagcctctgcctcccgggttcaagcgatcctcctgcctcagcctcccaagtagctgggattacaggcacccgccaccacaccagttaatatttgtatttttagtagagatagtggggtttcaccgtgttggccagtctggtctccaactcctgacctcagcctcccaaagtgctgggattacaggtgtgagccactgcacctggccaactagagtactagatttttatatagataaacatgaaaggattgtagaatcttcatattagagtggggcatttaaaaattccttcttgagaaagattaatttgcatctggatgctaataataaccttaattctggccgggcgcggtggctcacacctgtaatcccagcactttggggaggccgaggtgggcggatcacgaggtcaggagattgagaccatcctggctaacatggtgaaaccccgtctctactaaaaatacaaaaattagctggacgtggtgacacgtgcctgtaatcccagctactcgggaggctgaggcaggagaatcgcttgaaccagggagtcgtaggttgcagtgagccaagatcgcgccactgcactctagcctggtgacagagcgagactccatctcaaagaaaaaaagaaatccttaattctaataagtcacaatgtctcaaacttaccatctgttgggtaaatttgagaaaatgcaataccttgctaccatccttttaaatcagcctaccagactggatttccttattatggtttgtggcttttgattttttttttttaatgtatagctctctttgaattctttggtggttatatatatatgtactcgcaagattcttttatctgtgggtctttcattctttttctaacactgtgagttgtatccagagtactttcggaacctctcctgagcgacctatctctgcagatatctttgtttatgtttcccttgtactgccctcctggactcttcctcatccaccagcatttccatctagtgctttaccgtgccactgctaacaggtaatggctactgcagggctgaaatcagaggccagagtaggcccagcacttggcgtttcctatttgtgccttgctgctcttggtgcctgttcatgtgtgcccactaccttgcactcaatttctgtctttgctggtacctggctcacttgcttctttgttggctaccttggagggcagatagtgaattttcagaaatttccctttttttgtcagacagattgaaataaacaggtttgcattttgttttttctacaagcggcaagcccatgaccctagaagtctgacatctatggaaccttcagtttaaatgcccagggagaacttattttggtagatatgatttctgacattgcaggtagcaagttgaatataatttttctaaagtagcacccacagcagccaaattatcagatgtatatagtagactagttttaagaaaagcacttatgggtagaatatacatctggatttttgaggcagttttatttaggaattgtgtggttttctggaacatctcagagacctggtatgaaaagcactcttctaatatatatgtgtttttttttatggatttagtgatatatctatacacacacactttttaaaacctatagccggctgggcgtggtggctcatgcctgtaatcccagtactttgggaggcccaggcgggtggatcacaaggtcaggagattgagaccagcctggccaacaaggtgaaaccctgtctctactaaaaatacaaaaatagctgggtgtggtggcgtgtgcttgtaatcccagctactcgggagcctcaggaggagaatcgcttgaacctgggaggcggaggttgcagcgagccgagatcgtgccactatactccagcctgggcgacagagcaagactctgtcacaaaaaaaaaaaaaaaaacctatagccttctagagaaatttatatatgaagtacacaactaacatagctacacttcctaaatttggaatggagtggtttagcttatgaaaagttgctatttttcttaacaggttataagcaatgccttgaaagtttggggtttagaactaatcctgttcaacagtccagagtatcagaggctcaggatcgatcctatgtaagattctgttttgcatttcatacatttcttttcccaaatttgatttttaaagttgtaatttcttaaagaagagaaatacattttgaatacttttgttttgatgttccctgtttcattcactcagactttcctatttcacctttgtgatgtccatgagcatctgccctgtagccttcctggcaccccagtgtctgtggcagcacagagctgaccccataagtggtgcatgaggccatcttgtggcacagcatcactaagctgctgcagagacgttcatatggttgtgtgatcttttaaaaacatcagtgacacttaactataaatataatcttaaattatcacaaattttatataatatttgccagtagacaacataaatatgaattcaatatttcaagttaatattgtctgttttcttttttagaaatgaaagatcatttatatgcaattataaggaacactggtttacagttagaaaattaggaaaacaggtaacatttcttacccttccttgtctttttttcttatattgtaccccatttaaaactaaaatgtgggccaggtgtggtggctcatgccaacagtttgggaggctgaggtggggggatcacttgaagccaggagtttgagaccagcctgggcaacaaagggaggtcctgtctcttaaaaaaaaaataaaaataaaaataaaaataaataaaaaaaaaaacaaagagccaggcatggtggctcacatctgtaattccagcttacttggaaggctgagtcagaaggatcacttgagctcaggagtttgaggctgcagtgaactatgattttgtcactgtaccccagcctgggtgacagagtaagactgttctataaaacataaaaataaaaaaaatatatttaaaaattaaaaaaaaaaaaggattgctgactttaaaattaggaaactgaccagtaatgtgtgtgtgtgtagcatggtttatccttcttgatagatagaaattgtcattttaaaagataatatcagttttccttataaatttatttgtgacaagtatatgcaatttaactatatcataagaaaaattctatattaaagataatacaaatgtggttacttttaagtgggtttttatgtgatgactatgttctgtcagttaattattacatttatagatttgtatttagcatagtgctgtcacaaagcctgaaatagtgtcaagcatgaataaagcattcaattatgtttgctttagtgtaagattattcattatgattccaaaagccatgtaatacgtacgtctacagaaaatcacttctattttttaaataaaacatgaaatatgtcttgagcaagctattttaagaaacaatcatttaacgtccttgttattagaattttgaatctttgaaagagggttattgaaaaccagctaggacagtaaaaaagaataaactagtgatacatgcagcaatatggatgaatctcaaaataattatgctgaaagaataacccacaaacaaaatactacctgctgtatggtatcatttattaaaagtctagaaaagtgcagattcatctgtagtgatggaaagcagattgaccagcggttgcctggggacgagaaggctatggaggagtgagaggggagggttacagagaggcacgggaaacatggcaatgaggaatgtgttcactatcttggttgtagtaatggtttcatgggagtacagtatacaaatgtgaaaacatttcagaggccagatgcagtggctcatgcctgtaatcccagcacttttggaggccaaggcaggaggattgcttgagctcaaggagttcaggaccagcctgggcaatggcacaagaccccatctctaaaaaaaaaatgaaagaaaaaaaaattggctaggcgtggtgatgcatggccgtagtcccaggtgctagggaggctgaggagggagcacagaggtcaagcctgcagtgaatcatgatcgtgctactgcactccagcttgggtgacagaaggagatcctgtctcaaaaaaaaagtttcaaattatacactttaaatatgtgcagtttattatatgtcacttataccccaataaatctgttttttttaaaatgtaaatacaagccaaaaaaggtataagtcaagaaaatatattgaattaaatctgtaagagataattcaaaaacaaaaaccctattgttatcttttaagtcacccaaatcaaatttgggaaaagtcacctacttagcttcatcctaagttggttctttctttctttctttccttcttttgagacggattcttgctctatcgcccaggctggattgcagtggcgggatcttggctccctgcaacctccgccacctgggttcaagcaattctcttgtctcagcctcccaaatagctgtgtctacagccacgcaccaccacacccagctaatttttgtatttttagtagagacggggtttcgccatgttggtcaggctggtcttgaactcctgacctcaggtgatccgtccgtctctgcctctcaaagtgctggggttacaggcgtgagccaccatgccgagccctaagttggttctttcttaaagttcttcctgaggagccaagagcaagttaaggagatgtaacctagaagcttacagtggaggctagctgggtgcagtggttcacgcctgtaatcccagcactttaggaggctgaggcagggagatcactgaggccaggagcttgagagcagcttggcccaacacagtgacaccttgtctctacaaaaaaaaaaaaaaaaaaaggcagcttacagcagtagaggctgatgcgagtgggaatcacctctaggtaaaaaccagtgtagcgtactgctgagattatttaacctctgggttttatttatgtgtttttaaaaattatgatccagtattttttacttttttttgtataaagtaagcactgaatttttaaggttgtattaatttgcaaataaatgtctatcttattattttgagagatttaaaaaattttagttcttcaaaattgcattttcacattttgaattacgttatctttgacaaatacagaagatgtcaaattttggtttattttctttggttctaatttatatttttgtttaaaactatatttttcactatagactctttctgtctctcgaggtccctgtataatgaaaaagaaggctggaaaaagtattaacattgtcaaaatccaggaaaagtagttggtcatgatattgatcgttaactttagaaactttttgtatcttgtgggttaaattaggattactatgtggtagtgataaatgatgttaattagggccgagtgcagtggctaacacctgtaattccagcatgtagggaggctgaggtgggaggatgtcttgaatccaggagtttgagaccagcctgtacaacatagtgtaagaccccttctccacacaaaaaaattagaaaatttgtcaagcatcttggtgcacacctgtagtcccagctgcttgggaggatgaagcgagagaatcacttaagcccaggtgttcgaggctgcagtgagctatgattgcaccactgcactccagactagatgaccatctcttttaaaaaaatgtgtttatatgttatatgtgatagtgctttttaaaaacatttttaaattatagagacagggtctcactatgttacagcccaggctggtctcaaattcctgggctcaagcaatcctcccaccttagctaacctcccaaagtgctcggattataggcatgagctgcatgcccagctaatttagtgatttttaaaaactgagctggtaattataaattctcttcctggaacttctgactttctcacaattggaatcttttgacaaaaattatcagtaatgggaaaactttgtgtagttgtcatttttcctcccatcagtgtgatagatatgattggagttatgttggactgatattttgaaaaaagatttaattatagctattaataaagacatttaaactactgactatgcatttttattcttttgggagggtttaatgtttatagtttaaagcaaactgttgtttttaaaaaagtatctaacagggccgggcgcggtggctcacacctgtaatcccagcactttgggaggcctaggcgggcggatcacaaggtcaagagatcaagaccatcctggctaacatggtgaaaccctgtctctactaaaaatacaaaaaaatagctgggtgtggcggcgtgcgcctgtagtcccagctactcgggaggctgaggcaggaggatggcatgaacccgggaggcggagcttgcagtgagccgagatcgcgccactgcactccagcctgggcgacagagcaatactctgtctaaaaaaaaaaaaaaaaaaaaaaaaagagtatttagcagaggccaggtgcagtggctcatgtttgtaatcccagaactttgggaggctgaggcgggcggatcatttgaggtcaggagtttgagaccagcctggccaatgtggcaaatgtgctgtctctaactaaaaatacaaaaattagctgggtgtggtggtgcagacctgtagtcccagctacttgggaggctgaggcaggagaatcacttgaacctgggaggcagaggttgcagtgatccgagatcatgccactgcactccagcctgggttacagagtgagactcttctcaaaaaaaaaaaaaagtatttaatagtgataaatctgcagtattctcttgtagtttttaagatcatattattcagtcaaagaaaagagctcaacttgaaatatttccagagtttaaacaatcttactaagctttgatgggttgtatctattcttaacatgtgaaacttccttattacctataatatacactaacttaaatattgacaatttttttccagtggtttaacttgaattctctcttgacgggtccagaattaatatcagatacatatcttgcacttttcttggctcaattacaacaggaaggtaagtaacggctgaacattttgtaatgttacctttcgaagtagttaaataaccaggcacattagatgacagtgtgataaaactgtttttctggcagtggcagtgaaacaatctttagttttgacgtggtgataggctgtgatttgggtgacgctgttcagttagagttctcactgacacctggcccttcctcttctgaggatgctgctttctttgcagcccttctaagtaatggctttttcttttatacatcacatatcacacggctgagaggagggatagatgtttttcttctttgcctcttctaggccactgttcttccttataaactccagtttctttgaaatacatgcccctaacggctgggcacggtggctcacgcctgtaatcccagcactttgggaggctgaggcaggcggatcacgatgtcaggagatcgagaccatcctggctaacacggtgaaatcctgtctctactaaaaataacaaaaaattagccggggtgtggtggcggacgcctgtagtccgagctactcgggaggctgaggcaggagaatggcgtgaacccaggaggcggagcttgcagtgagctgagatcgcgccactgccctccagcctgggcgacagagcgagactccgtctcaaaaaaaaaaagaaaagaaaaaaaaaagaaatacatgcccctagattaaactatcccttgtccttttgcactcatccacaagtctcttttcatcagtgattttaggatctgactcgttgtctttttctctacttcaactacttttatcattcttaattatttctgtatcgtcaatcaatccagtacctgcctcttagtttcaaaatcacttactcttgcttagctattaccagtaatcataaccactgtcaaatctcaattgcaagcatattactctttaactaccacctcctatctttaaaccatgttttgtctgtttttttattccagccattctttaaaccctactgtggggcccaagcatttcctttatacgcattcttcctttcttctactgcttattttctgtaatccgtcatcataatcactccattgcattcttcaacgtgtttcccctctctccctccatcatacttgaatgacaaaaatctcaaccctggttaaaccacatcttggccttgtccattcctgtaccagagtagctggacgtggctaaaaaataacataaaacatgatgattggttttacttttttcttaaatgatctatccatccattcacccatccatctatcaaagtgactaggcctatttctgaagcccaggctggagtgcagcagcataatcacagctcattgcagctccaaactcctgggctcaagtgattctcttgccttagcctgttgagtagctgggactacaggcttgtgctaccacacctagctaaggttttactttaaatttattataatcacaaaattcagatgagcctttagtgctgtctgatatttctactatgttttcttagtgatgtaccaccctccaaggtgtttataaaaaattatgtaccactctccaagaagtttataaaaaataatgtgccaccctccaaggtgactaatttcacagcttatgtctttaaacctttaagcactttcctctcccttacacaccttccttgtggctttccgttacattctgctgagaacatagaagcaattaaaattatgttctttctaccagcaaatttatcaatttgcttatatcttcacctgtgctttgagcctatttaaatagatgaatggtcccctacctctaaccaaaaccagtccctcacttgtgggctggatcccagctcttctcacctactcaagatgttcctgctttcatctctccactctcttatataatcagttccccccccctttttttgtaatattcctataagcagtaaaataagctttttatttccattgattaaaaataaaaatcctctcttaattccatgaaactccagctgcctccccatttttattttttccttaggattgtctctagtgtgccttctccttttcttgaactctgcctcctgggttcaagcgattctcctgcctcaacctcccgagtagctgggattacaggcgtgcaccaccatgaccggctaattttttttttttttttttgagatggagtttccctcttgttgctccggctggagtgcaatggcgtgatctcggctcaccgtaacttctgcctcctgggttcaagcgattttcttgcctcagcctcccgagtagctggatttacaggcatgtgccaccatgcctggctaattttgtattttagtagagatggaaggggtttctccatgtttgttaggctggtctccaactcctgacctcaggtgagccgcccacctcggccccctaaagtgctgggattacaggcatgagccactgcgcctggccccggctaaattttttttttttttttttgtatttttagtagagacagggtttcaccatattggccaggttggtctcgaattcctggcctcgagtgatccacctgcctcagcctcccaaagtgctgggattacaggcgtgagtcaccttgcctagccatcttttagtaatggtatttggagatcacaatttgagtgctggcatgcttattgctgctgggtttgttatgtagttattgtgaattcacatttaggaatatagggtttttaattctttgattttagatacttgtatcttttttcttttatatttaaaaccttggttcctgatgatatcccttcttagaaaccctgtctacctttggccttcagcccaccatgctgtggttttcctaacttgctgcctgcacttttcagattcctttcatggatcttaaatatcatctgtaaataagatctatgtgtcaataattaccaaacttttatctttagtcttgacatctaccctgaacacctagctttgactaactcctagctttggcatctccacttggaaatccaaaaagtgtttcaaactgaacatgtctatgaaagacttatttttttctctctatccatgctatccatcaggttttccatttccataagggtgactcttgtactctggttcctatatattataccgacagagcagcccagagtgcttcttaaccagtgtaaggcctgttatgtcccaccctcactctttgtccttcagtggcttcccagcacacttagaataaaatctgaagtcttaggccgggcttggtggctcatgcctgcaatcccagcactttgggaggatgagggggcagatcacttgaggtcaggagttgatgagaccagcctggccaacatggtgaaaccctgtctctaccaaaaaatacaaaaattaactgggtgtggtgttgtgcacctgtagtcccagctactcgggaggctgagataggagaatcacttgaacccgggaggcagaggttacagcgagccaagatcataccactgcactccagcctgggtgacagaacgagactctcaaaaaaaaattaaaaaaaaaaaatatgtgaagtcttgaataaaacccaagatctttaccatggcccctgaacagggcagagtatccattcttcagacactcttcatagaataccatggtgagctggcatatttattatacaatacagaaacaattttactggcagaaaacacattaaaccgtctaaactctgaatacagttgtcctcataaaaaatgttcaacatactattttgaggttttccattaatagttcttataatctttgtcccattatgtgttaatccaacaaaggatatccaataacaaacaccaaagtttaagaaaaatgtgctaggcgcggtggctcacacctgtaatcccagcactttgggaggccgaggtgggcagatcacctgaggtcaggagttcgagaccagcccagccaacatggtgaaaccctgcctctcctaaaaatacaaacattaactgggtgtggtggtgggtgcctgtaatcccagctactcaggaggctgaggcaggagaatcgcttgaacctcctgggaggcagaggttgcagtgagctaatattgcaccactgcactccagcctgggtgacagagtgagactccatctcaaattaaaaaaaaaaaaaaattaatgatagagaaacttaaatcagttagattgttttaggtatagcccatccttggtttttgtgtgtagcatctagcttggggaaaccctggatttctggaatcatatttagacacagtcacactagactaatgtaattcttttgggatgcaaaccacacgtttgacaccttaaatagcttttaggtatttggcttcccagcccctatttttagttacaaggggtgtacatgtgtgggtcagggtgggggtagctctttccgcagatgattagttttagccatgttactagttattgcacacattatctgtgtcctcacagcagccctgtgagtaagtgtattagggttctctagagggacagaactaataaggtagatgtatatatgaagggtaatgtattaaggagtatcgactcgtatgatcacaaggtgaagtcccacaataggctctctgcaggctgaggaaccaggaagccagtccaagtcccaaaacctcaaaagtagggaagctgacagtgcagccttcagtctgtggcaaaaggcctgagagcccctggcaaaccactggtgtaagttcaagagtccaaaagatgaagaacttggagtctgatgtttgagggcaggaagcatccagcatgggagaaagatgaaggctcagcaagtctagtacttccacactcttatttctgcctgctttattctagctgagctggcagctgattagatggtgaccacccagtttgagggtgggtctacctctcccagttcactggcttaaatgttaatctcctttggcaacaccctcgcagacacacccagaaacaataatttgtagccttcaatccaatcaagttgataatattaaccatcacaggaaggtactagtatcatatgtttaacagtagaaaccaagacaaatgcagctaggaagtgggagaactgggatcagatgcaggcagtctgattctaaatcagttgctgttacccactctgacaacagtaagtgagtagcctgctcagtcaagtactatattagtagggccctttacagacatatttatttctcacagtcactcaatgagacggctcttccagtcttacaatggagaaagtgaggctcagagactttaagtaacttaccttagacgactttactagtaagtataagaatcattatttggactaaagtctttctgaatcctcagcttgtatttttttccagtgttctgtgctgcctttttatctactagtgttttacatcaattttgaatctctttactaactggttaggttgatttttgccttttttttttaggttattctatatttgtcgttaagggtgatctgccagattgcgaagctgaccaactcctgcagatgattagggtccaacagatgcatcgaccaaaacttattggagaagaattagcacaactaaaagagcaaaggtaaaaatgaggcctgcagtatggaatatatggtagtatttcattatgagaattaaattttcatgcttagattgaatatgtggtccttgtgttgttggcgactctattttggaccttatattttagtgaagtttattagtttaaacttgaatcaactctttgaaatacttaaatatattaacttagttagctggtatggtatattcctagcacttcgggaggctgaggcaggctgattgcttcaacccaggagttcgagaccagcctgggcaacatggcaaaacctcatctctacaaatagtacaaaaattagccagatgtggtggtgtatgcctatagtcccagctacttgggaggcagaggaagaaggatcacctgaaactggggaggtagagactacagtgagccataatcacactaccgcactccagcctggtcgagagagtcagaccctgtctcaaaaaaaaaaaaaaaaagaaacggaaaaaaaaaacttagttggattcaaattgcaacacaatcattatattactagagcttatttgccagaaaacattttaagttttgacttacttaaagcctttacattacaaatgcctttatgttatgtctaaaatagaagattggttgcagttattaccagtgcttttgttctttagagtccataaaacagacctggaacgagtgttagaagcaaatgatggctcaggaatgttagacgaagatgaggaggatttgcagagggctctggcactaagtcgccaagaaattgacatggaagatgaggaagcagatctccgcagggctattcagctaagtatgcaaggtaaagacattctgatgtgtgttgtattcattgctgaagaattgattccaattattcttagatttcatggaagttaatgtactcttagaggtgttttgacaattactgcagaagcaatagctatatagtgggctttccctttagatttcttataatggaaatcactttttacaacctatattttattaggagtagttatatttttactcctggttattttatttggtttcaacactgtactaacacaatagtaaattgtggttttaatctttgtgggtatcagttgacccttatccaaatcagctgttacataaatatgtgccattagacactatggaagggcctggacagggaatataaactgattttacaaaaacccaacatttattggctatgcaacttaaaccgtaagcccactttggtgggcccagttttttagtgatataaactatcaatagagaaaagcgaaaacatatcccctagacaatctaggcaaagaaaaatgttaagacatagctcaaagtagcttaattaaaagtttgaagtgggttttttgttttatttttttctaactcatatgtatttgcttctactttctaatgaaattatttatcagttgatttccttagatatctaaataaaattgaaatttcattaatgggaagattatttttatcctgaacttttcttgcctctatgcatgcctctgagtactccatatggtgtgcaatcccatttttgattaatagagtcctgctggattagcagggacagaaatcagctttagatttctttcttttttttttttctttctttttttttttttttttttttgagtcagagtctcactgtcgcccagcctggagtgcagtgatcttggctcactgcaacccctgcctccgaggttcaagcgattctcctgcctcagcctcctgagtagctgggactacaggcgcctaccaccacgcccagctaattttttgtacttttagtagagatagggttttgcccttttggccaggctggtcttgaactcctgacctcaggtgatccacctgccttggcctcccaaagtgctgggattacatgtgtgagccaccacgcccagccagaagagtagaatattcttaaagagaaaacgttttaaaggcttactcaaatgagtataaacaaacatattgttgcttgaattggtaaatacagtgattggtttttgttgtgttgtgttttgttttcaggtagttccagaaacatatctcaagatatgacacagacatcaggtacaaatcttacttcagaagagcttcggaagagacgagaagcctactttgaaaagtaaagtagttggtacaagttaaagtagcatgtttaatatttgctttggctattttgtctatttgtaaatggttactgcctgaatcctgtgaatatttgaatgtattttttaaaaatttacagcaaataggacgggcacggtggcttacgcctgtgatgctagcagtttgggaggccaaggcgggcagattgcctgaggtcaggagttcgagaccagcctgggcaacacagtgaaaccccatctctactaaaaatacaaaagaatcagctgggcatggaagcgtgcgcctgtagtcccagctgcttgggaggctgagccaggagaattgcttgaacccgggacgtggaggttgcagtgagccgagatcgcaccactgccctccagactgggtgacagagtgagactccgtctccaaaaatatatgtatatatatataaataaaaataaaaatttacggcaaataacatgaaacaaaaaaaccttgccccaatactggataaattttttaaactgagtgaaggaaaccttataaaatttcatttattaaaagaaaaatgaaattaggacaagacaagaagaatgccaattgatcctttggatgtacttcttgcttacctgattaaccctgcaaaattcctctaccaatcagtacgaaaaacagctttggaggtatgggagcgcattcccaaatagacgtggtagttcatttagctgctcatggccgcttcaggcagtcctgtaagcctgttagcatcaggggaatggatgcaaaccataaatctggatcaactcctaaaaccttaccttgtgcccagccttgtaagtgcttgctaaataggaattccaccatatgaaaatacattcttttcaagtaactatcattcagacttttgtcccccactttttttttttaaagaaaaataaaaggctgggcacggtggcttacgtctgtaatcccaccattttaggaggccaaggcaggtggatcacctgaggtcaggaattcaagaccagcctgaccaacatggtgaaacctcatctctactaaaaatacaaaaattagccgggcatggtggtgggtgcctgtaatcccagctacttgggaggctcagacaggagaatcgcttgaatctgggaggcagaagttgcagtgagctgagataacgccattgcactccagcctgggggacaagagcgagacttcgtctcaaaaaaaaagagaaagaaaacttcatgttaaagattacaagataaataatcagacccactgatcctaggtcagaaaacagagtcatagctcaatctgacttactatttgctgtatttcatccattctgagatgcacatagtttcacatttcaatgtctctgaaattgagaagcatcttacagtcataattgacagtatattagcagcacctataaatattggctcattttacatttgatggtataatgaagaaaatatttacctttttttctgttttgtttttaagtcacaactcagaagtagatgaaggaaaattctgatcagctgacatcctcttaatgtgagatatttctagtctttattcagtatagattaatggctaattatatgttaaatttcaaagtagtgcttattagtgctttttacttttaagtttcaaaattaacttttttattataataaactccaaatttatacaaaagtagaaaaactagcatactcctgtttatgacccagattcaacaaatactagcacacggccaatcttgcttttttttttttttttttttgagatggagtcttgctctgttgcccaggctggagtgcaatggcacaatttctgctcactgcaacctctgcctcctgagttcaagcgattctcccacttcagcctcccaagtagctgggattacaggtacacaccaccatgcctggctaattcttgtatttttagtagacacgggatttcaccatgtcgtccaggctggccttaaactcctgacctcaagtgatccacctgcctcggcctcccagagtgctgggattacaggcatgagccactgagcccggcccaatctcgttttataatactcccatctcccattctttccactgtcccacctgcaagtttggattattttgtaacaaatctcaatcatcatattattctataaccattttaatatgtgtctctaaaatatattagctttatttttaacatagttaaatgctattgtcataaaataataatcataataattaattgtaattctatatcatcaattatctagttaatgtaaaaaataaatctaaggccaggcgcggtggctcacacctgtaatcccagcactttgggaggctgaggtgggcagatcacctgagatcaggagttcaagaccagcctgaccaacatggagaaaccccatctctactaaaaatacaaaaaattagccaggcgtggtggcgcatgcttgtaatcccagctacttgagaggctgaggcaggagaatcacttgaacccgggaggcgaggttgcggtgagccgagatcgtgccattgcactctagcctgggcaaaaagagtgaaactccatctcaaataaataaataaataaataataaaaaataacttaaatctacttaattagaaaaactaacattctaaaaattttattttaagaaatatcaaaattggctgggcacggtggctcacgcctctaatccctgcactttggaaggctgaggtgggcggatcacctgaggtcaggagggtcaggagtacaagaccagcctggccaacatggcgaaaccctgtctccactaaaaatacaaaaattagccaggcatgatgatgggcacctgtaatcccagctactcaggaggctgagacagaagaatcgcttgaacccaggaggtagaggttgcagtgagctgagatcaccccactgcactccagcctgggtgacagagtgaaactccgcctcaaaaaaaaaaaaaagagaaaagaaatatagaaattaaagcatacatggccaggcgtagtggctcatgtctgtaatcccagcactttgggaggctgaggcaggcagatcacttgaggccatgagttcaagaccaacctggccaacatggcgaaagcctgtctctactaaaaatacaaaaaaattagttgggcatggtggtgcacacctgtaatcacagctactttggaggctgaggcaggagaatcgtttgaacccagaggtggaggttgcagtgagccgagattgtgccactgcactctatcctgggtgacagagcgagatactgtctcaaaaagaaaaaaaaaaggctgggcgcggtagttcatgcctgcaatcccagcactttgggaggccgaggcaggcagattacgaagtcaggagatggagaccatcctggctaatacagtgaaaccccgtctctactaaaaaatacacaaaaattagctgggtgtggtggcaggcacctgtagtcccagctactctggaggctgaggcaggagaatggcatgaacccgggaggtggagcttgcagtgagcagagatcacaccactgcactccagtctgggcgacagagcgaggctctgtctcaaaaaaaaaaaagaaagcatactctcacctccttcagtgactgatgttagtattttggcacattctttttctgtgacatatacacacttaccttgtaagtgttgtactcatttcctatgacagtaaatagtctttgtaacaggctgcatgatatttcataaaatgaatggatgtggcataatttatatgtgagccttttgaattctgctattataattaatattgcaatgaacaattcttatattgcctctacacctcaaatgtcttatcatttcttctagtttttctgaggatgtcagattattgggttaaaggatatgaacatttttaaggccttggaacagatttctaaattgctttccagaataattcccatgtgatactttcaccatgtttatttcagacttttttttttttttttttttgagacgaaatctcactctgtcacccaggctggagtgtagtggcatgatctcggctcactgcaacctccgcctcctgagtttaagcgattattctgcctcagcctcccaagtagctgcggttacaggcaagtgcctccatgcctggctaatttttgtgtcttttgtagacatggggtttcaccatgttgcccaggctggtttcgaactcctgagctcaggcaatctgcctacctcggcctcccaaagttctgggattacaggcgtgcaccaccgcgcccagccatcagagtcttttttgtcaaaataaaatggtctaaagacatacatcatagagaaactataatacaaaatttacaggtatatctaagaaaagaaaagtatatttaaagcataaaaataaactgctcttttacttaaaattttttaaaaactggattaaaaatatgaaacttccaacaaattgagcttttttttttttttttttcttttttgagacgaggtctcgcttttgtcacccagtctggagtgcagtggcgcgatctcggctcactgcaacctccacctccctggttcaagcaattcccctgcctcagcctcccaagtagctgggattacaggcgcatgccaccacgtcgggctaatttttttgtatttttagtagagagggggtttcaccatgttggccagactggtctcgaactcctgatctcaggcaatctgccagcctgggtctcccaacatgctgggattacaggcatgagccactgcactcggcctgaactttttatagtagtaacgataattcagtaatgtccaataatgactaagtaagttataacaagtacaatgtcagcaataactagtgctttttagtaaacagggtcaggcaaccttgtacccttttaaaaatgttcgaatatcgatatacctccttcctacttggtggaggattgattgaggaggaaagtgtgcagtgatggttaccagcttcagcctcttggcttgactttgcaaatactggtgagaatttggaaagagcttgagaatatcttacatagtcacatgttgctgagaagagttaagaactaacttcttgatgttcatttttaacaatggcttgcattcaaaaccttgtagagctcattagtaggagctaagaagctaatatttgcctttcactaaaattcctgattacttagcctaggtagttcgttgtctctctaggttctgtctttgggagcttgggtctaaggttatcaagctaactctttcttccctctcacccttcccaaattgaccctggtgctgatttgttattcatacgattttctagtttttcttttccctttttgagtatttgaagcttcatactgaatatagtaatcatagtattcatgcataaagaaaatcataaagtaattgcataaatgcataaagtaatcatagttttcatgcattaaaaaaactagttttggctgggcgctatggctcacgcttgtaatcccagcactttcggaggccaaggcaggcgaatcatctgaggtcaggagttcgagactagcctggccaacatggcgaaacctcttctctactaaaaatacaaaaaaattagccgagtatggtggcgggcgcctgtaatcctagctatttggcaggctgaggcaggagaatcacttgaacctgggaggcagaggttgcagtgagccgaggttgtgccattgcactacagcctaggcgacaagagcaagactccatctcaaaaaaaaaaaaaaaaaaaaaaaaactccctattacagattcataatttatgagtcattaaataatattttcaagccatgacattttttccagcagtagtctctaaatctgttttaccatcataaaaccccaagcaaaactctactacatcagctgtgtcactgtaaaacctgccttaactcacagaagcatgaaattaagcaatgtgtgtgaaactattttataaactgtaaagtattccatacatacatgttggcagttattaatgtcttctctaggtgtggctttgaaatggatgcagatgctttctgttacaaaaaacataagttgcaaatgttctataacaaggagagacacaaatatcttcatggacatggattgctatgagtgtttgattgcctaatacttgagccaccacttcagtgatatggtataatttatcaaacagtgttgagaaacagaaactactggggatgttttaaagaggaaaatacttaatatagaaattaggggtttacataatcttaagaaaggatgaaggtgcagctcttagccaggcctccacagtaccacaaaccaacttgcaggaagagctgtaaccactgccccagttgggacaatgggtaatgaggatattaaatttaagaacatactgctatagcaatgatccttggcatagaaagctgccaccacaattgcctagagatgggaacatgaagtctggcccccattgcaacagcagtgaagcagaattttgggactggcatctcccaaatggctttgcttgccaccagagaacaaccaaagtggagggagatggctaggcctcatttctgcctattttattttattttttgagacggagtcttgtctgtcgcccaggctggagtgcagtagtgtgatctcggctcactgcagcctccgcctcccagcttcaaacaattctcctgcctcagcctcctgagtagctgggattacaggcacccgccactgtgcccagccaattttcttatttttagtagaggtggggttttgccacgttggccaggctggtcttgaactcctgacctcaggtgatctgcccgcctcagcctcccaaagtgttgtgattacaggtatgagccaccatgcctggcccatttctcccttttttttttttttttttttttgaggtggagtctcactctgttgcccagactggagtgcagtggtgcaatcttggcgcattgcaacctctgcctcccagtttcaagcaattcttctgcttcagcctcctgagtagctgggactacaggtgtgtagcaccacacctggctaatttttgtttttgttttgttttttttgagacagagtctcactctgtcacccaggctggagtgtagtggcatgatctgggctcactacaacctccgcctcccgggttcaagcaattctcctgcctcagcctccagagtagctgggattacaggtgtgcgccaacacacctggctaatttttttgtatttttaatagagatggggtttcaccatgttggccaggctggtctcgaactcctgacctcgtgatccgcccgcctcggcctcccaaagtgctgggattacaggcatgagccaccgtgcccagacaaggtttgtatttttagtagagacagttttgccatgttggccaggctggtcttgaactcctcacctcaggtgatccgcctgccttggcctcccaaagtgctgggattacaggcgcaagccactgtgcctgacccgtttctgctttttaaagctcatgtgagcacttaatttgtaaccagaatcctacttgtaaaataatctaagacatgtagcttttagctttgtaacctctataatattgatggcacagtgggagtggatgctgagtaccacttgaacatgttccacctcagtgtcttcacagctggaaggtgtctacattgtttcaaggtggacaattgatttacttctcatttttcataaactaaaagtagaataaaggctattcctctaaaattgctatctcacctgtcactcccttgcattctcacataccttcttgagtggaggggcagagggcatggagtgatagcagatgtgccaggaattctccataactcagtccgtccctcttgtgctatgttgcagcatcaggatttgctaatgggaggatactgcccttacgtgcatcattagccatgcacactaaggtcttacacctacacacaggtcagtattctggctcagagaccaacagggagaaattgcagttctcattagttgaactttctttattgttcacagttttaaaacacaaaattgagaggaactctataaaaaatgtgccattctattaataattgttgctggtaatttaaaaatccttgttccttttcaaattcttatataccttttttttttaaacacttgatcttagccaaaagaccgagaagcaatcttttttttttttttttttttttttaacctatagcttctcactgagattgtcagctgtttgtaagttttggtttttggttttctgtgtttgtatttacatatatgaaatacagattgagtatcccttatccaaaatgcttaagactggaagtgttttagatttggggttttttaggatttgtgaatatttgcactatacttaccagttaagcattccaaatccaaaatttcaaatctgaagtgttccactgagcacctcttttgagtatcatgttggtgctcaaaaagtttctgattttggagcatttggatttctgattctcggatttaggatgcttgacctgtaatttcagatttacataaaagcagaaatagtacacagagctccttatatccttcacccagattccccaattattggcctttctgaaccatttgggaataatatgcagatatgattttccattatgtctcagttgttcagtgtatattttctaagtacaagaatatattcctacatatttacatgataaccgtcatgtttaaacattttaaaatggggatttgtattacattgtttctctttttgaaaaaattacagaggagcttaatgcaatcagtattacttaaaatctgataatgtgtgttaaatagtagttttcatttatttcatttatcaggtgttcagtgaatgcttactatgtaacagcacagttatcagcactggggaaatagatgagtaagataagatttgcactttcattagcttacatgccataaagagggaaataaagagaacaccagatgatgataagtttatgctgagaattaaaatgaagtgatgaaataatgggaatgtcaggtggctacttttggtgggatggtcaggaaaggcatctctggggagataaattttaagctcagacctgagtgaaaagaatgagccagccatggaaacattatgttaactcacatggtagtttgaaatgctttatctgatcaaaggtacttatttttggtgactttcaacaatattaagggtctataaaccaacactcatttgcataagaataactaccagtgaatctttttgtatgataggttttttgtttgttgtttttttgagacagagtctcgctctgtcgcccaggctggagtgcagtggcgcgatcttggctcactgcaacctctacctccccggttcaagtgattctcctgcctcagcctcccaaagtagctgggattacaggtgcctgccaccacgcctggctaatttttgtatttttagtagagatggggtttcaccgtgttgtccaggctcgtgtcaaacttctgacctcaagccatccacccgcctcggcctcccaaagtgctgggattacaggtgtgagccaccactcctggccatgataggttattttgtgatgaaaatacctacctcttaatttgtctgataaatttaaattttatgtctagatttcctaagatcagcacttccatattttaaagtaatctgtatcagactaactgctcttgcattcttttaataccagtgactactttgattcgtgaaacaatgtattttccttatgaatagtttttctcatggtgtatttattcttttaagttttgttttttaaatatacttcacttttgaatgtttcagacagcagcaaaagcagcaacagcagcagcagcagcagcagcagggggacctatcaggacagagttcacatccatgtgaaaggccagccaccagttcaggagcacttgggagtgatctaggtaaggcctgctcaccattcatcatgttcgctaccttcacactttatctgacatacgagctccatgtgatttttgctttacattattcttcattccctctttaatcatattaagaatcttaagtaaatttgtaatctactaaatttccctggattaaggagcagttaccaaaagaaaaaaaaaaaaaaaagctagatgtggtggctcacatctgtaatcccagcactttgggaaaccaaggcaggagaggattgctagaacatttaatgaatactttaacataataatttaaacttcacagtaatttgtacagtctccaaaaattccttagacatcatggatatttttctttttttgagatggagtcttgctctgtcacccaggctggagtgcagtgtcgcgatctcggctcactgcaagctctgcttcctgggttcatggcattctcctgcctcagcctcctgagtagctgggactacaggcgcccgccacatcgcctggctaattttttgtatttttagtagagacagggtttcaccatgttagccaggatggtctcaatctcctgacctcatgatccgcccgcctcggcctcccaaagtgctgggattacaggcgtgagccatcacgtccggccagaaatcatgaatattagtaggtgaaaaataaacacattttaccacctggaaaatgaaaaatacttgagtataatctaaataacaatgggaagtgcagagttactttccaggtctcggtttaaatatgtcttaaactttggccaattagtagtagaagttgagagaaaaagtaactatctgacaaagaaattataagcagaatatataaagaactcttaaaactgaataatcagaaaacaactcaataaaaaggtgaaggatttgaaaagatatttcaccaaataagacatagggatgacaaataagcacatgaaaagactctcagcatcactagtcacagggaaatgcacgataaaaccacagtgagacaccatggcacccctgtaggtatggctttaatgaagaaataaaactgacaataccaagtgttggcaaggatccaagcagctgagactcatatactgttaatgggaatgtaaaagtgtacagctttggaaaacagtttggcatttttttgataaatgtatacttagccatgtgatccagcagtcccaatcatgtatatataaccaaaagaaaagaaaacttaggttcacataaaaacttatatcaaatgcttatagctgaccaggcatggtggcccatgcctataatcccagcactttgggaggccgaggttggcagatacctgaagtcaagtgttcgagaccagcctggccaacatggcaaaaccctgtctctacttaaaatacaaaaattagccaggcgtgatggcaggcacctgtagtccagctattcaggaggctgaggcaggagaatcacgtgaacccgggaggcagaggttgcagtgagccgagatcgtgccactatactccagcctgggtgacagagcaaaactctgtctcaaaaaaaaaaaaaaaaaaaagggctggacacggtggcttacgcctgttatcccggcactttgggaggccaaggctgatggatcacctgaggtcaggagttcaagaccagcctggccaacatggtgaaaccccatctctactaaaaatacaaaaatttgctgggcatggtggtgggcacctgtaatcccaggaggctgaggcaggagaatcacttgaacccgggaggcggagattgcagtgagccaagattgtgccattgaactccagcctgggtgacaagaccaaaactccttctcaaaaaaaaaaaagattatagcatctttattcatcattgcccaaaattacaaactgcctaaatgtagaccttcatttagttaatgaatgcacaaactgtggtatatccaaacaattgaataaaaaaaggaatgaactggtacttttttctattcctcctgtttaagtacagccaaaacacctcaacatttgtataaaacatgagctgggctgggtgcggtggctcacacgtgtaatcccagcactttgggaggctgaggcgggtggatcacctaaggttgggagttcaagaccggtctgaccaacatggagaaaccctgtctcaactaaaaatacaagattagtcgggcatggtggcgcatgcctgtaatcccagcttcttgggaggctgaggcaggagaattgcttgatcccgggaagcgaaggttgcagtaagctgagattgcaccattgcactccagcctgggcaacaagagcaaaactctgtctcaaaaagaaaaaaaaaaccattcagctgaatctcaaaggcagagagaagacagactggctagggaccttggaaccagaggagcagtgtggtggggagtggactggattttctttttgcctcatttatcctggacttggtgctggagaagctatgggttcagaccaagagaaaaccccatgaaaagcctgctctctctagccaaaagaggcaacctagcaagataaaaacctttagataataagcacttgactccagtcaaacaaaacagaataaactggccccattcacccctgtcagcaaaggccaagtgggagccaagatatgtaccccaacctggaagtcataaggtacacttctcccctttcccagccaaggtggtgttagagaaggctgactggggagctgggattctcattccctccaggaggtgataacactcctttcacatggtgtcagtggtcacagggaggctgaacttccacccagtaatacataggcatctctctggctcctatatgggtgatgttggagaagaggccgagtagagaatccagactgttgctgacacccagcagtaacaaggacacctccacaatgtccgtggaggccatgtggagatcagtaacaaggcactgctctccctcccagtcagagagatgtcagtggaggactagggggctagaactcccatgtgcgttcagcagtaatccccatgaccgccactccttgacatcacaggccttgaagaaacctggactttcactcccctctggttgtagcgaggtggcactcccttttccctgttgccagtgctgtgtcagtggaggcttgctaaattggaagatgtaaataagattcacattctcataacataataccccaaattttcaggatttaattgaaaatcactaagctgggcatggtggctcacacctgtaatcccagcactttgggaggccaaggtgggccaaacacttaaggtcaggaattcaagaccagcctggccagcatggtgaaaccctgtctctactaaaaatacaaaaattagctgggcgtggtggcacatgcctgtaatcccagctactgggaaggctaaggcaggaaaatcactggaacctgggagacggaggttgcagtgatccaagatcgcactagtgtactgcagcctgggcaacagagcaagactccatctaaatttgtgtcaggattcccagaaggagatgagaaagggtggggctgaaaaaaattgaggaagaagtcatggctgaaaatttcccaaatttggcaaaagtcagaaacctacagattgaaaaagctgaatgaagctcaaatatgataaactcaaagaagttcacacagagacacatcacagtcagatttctgaacactgcagacaaaaaatgaagatctcgaaattagcaagaaatgaccttacctaagcaatttgaatgacagcagatttcccatcagagatcataaaggccagaaggaaggggtacatacaacattttttctagtgctgaaagacaaaaactctaggctgggcacggtggcacacacctgtaatcccagcacttttggaggctgaggcaggcagatcacctgaagtcaggagttcgagaccagcctggccaacatggggaaaccctgtctctactaaaaatacaaaaattagccaggtgtggtggcacgcacctataatcctagctacttgggaggctgaggcaggggaatcgcttgaacctgggaggcgacggttgcagtgagccaaggtcgcgccactgcactccagcctgggcagttgagcgagactccatctcaaaaaaaaaaaaattatccaggcttggtggtgggcgcctatagtcccagctacttgggaggctgaggcaagagaattggttgaacccaggaggtggaggttgcagtgagccaagctcatgccactgtactccagcctgggtgacagagcgagaccttgtctcaaaaaaaaaaaaaaaaaaaaaaaacaagaaaaaaactctaaacccagagttacatatccagtgaaatatccttcaggagtgaagggaaaattaacgatttgtcttcaggagacctaccctaaaagaatggctaaaggaatttctctaaacagaaaagaaatgataaaagaagtaattttggaacatcaggaaggaagaaagaacaataaaaagagtaaaatatgggtaaacacaatagactttcccctccttttgaattttctaaattgtatgatggttgaagcaagaattatagcactgatttggttttcagtatatatattggaaatatttaaggcattatgttacagatgaaggagggtcaaaggatataaagggaggtaacctttctatatttcttttgtactgatgcaggcactttggaaaataatttcactatttgtttaaaaactgaacataccctgaccatatgacatagcatctatactcctgggcatttatcccagagaaacagaaatttatttattttttttttagtattacactccgtaagtgctgtaatactagcacttagggaggctgaggcaagcagattgcttgagcccaggagttcaagaccagcctgggcaatgctgcacagtcaaaaaagaaaaacaaacatttagaaaactattttaaaagtctttaattgctgaatgcctctttggctaatatttggaagatcattattattatttttcttttttaggcagagtcttgctctgtcactgaggctggagtgcagtggcgccatctcggcttactgcaacctctgcctcccgggttcacgccattctcctgcctcagcctcccgagtagctgggactacaggcgtgtgccaccatgcccggctaattttttgtgtttttagtagagatggggtttcactatgttagtcaggatggtctccatctcctaacctcgtgatccgcccacctcggcttcccaaaatgctgggattacaggcgtgagccactgtgcccagcctggaagatcattatttagtcctacaactgacacattgttccactgacgcaattgcccaggctggtcttgaactcctgggctcaagcaatctgcctgcctcggcctccctaagtgctagtattacaggcttgagccactgtgcccagccaaaaatagaaatttatattctcacaaaaacatgtacatgaatgtttatagcagctttacttgtcataatcaaaaactggaaacaaccaaaatgtcctacagtgaaacaaactgtagtacatccatagcatgtaatactctactgtcaggattaaaaagaaacccactgttggcacaggcagcaccgtggctggatctcaggggcattatgctgagtgcaaaaaagcctcaaagggtcttacactgtatgattccacttgttcaactaaaaatgacagctgtatagagatagagaacatattagtggtttccactagttagagaaagtgggtaaaagataggtgggtgggaatataaatcgatagcagggagatctttgtggtattataacacttctatgtcttgattgtagtggtggtggttacatgaatacacgtgtgataaaatgccatgtagaactacatataacgttgtgccaatgtcaatatctaggttttagtttgatctttagttacataagatgtaactattgggtgaaattgggcaaaagagtacacgaaacctctcttaaatatctttacaacttcctttgaattgacagtttttcaaaatagaaagttgggtttttgtaaatacatgaattgttgatatacacaacaaatctcaaatgcattatgctacgtgaaagaagccatattcaaaaggctacatacctactgatgccttttatatgacgtgcaggaaaagataaaactgtaggacagagaatatactggtggctatctgggattaggaaatggggatcgaccacaaaggggcagcatgggggaattttctggggcaatggaatggttgtgtatcttgatggtgtatttgtcaaaatatatagaactataaaagtaaattttgctttatatgtattaaatcaaaaaaagaaactcgtgctcaaatagaaatacattttctgagaacttgccttttgatgactttgagaattttctggaaattttaaagaaatgtggttttgtttcccaacaggtgatgctatgagtgaagaagacatgcttcaggcagctgtgaccatgtctttagaaactgtcagaaatgatttgaaaacagaaggaaaaaaataatacctttaaaaaataatttagatattcatactttccaacattatcctgtgtgattacagcatagggtccactttggtaatgtgtcaaagagatgaggaaataagacttttagcggtttgcaaacaaaatgatgggaaagtggaacaatgcgtcggttgtaggactaaataatgatcttccaaatattagccaaagaggcattcagcaattaaagacatttaaaatagttttctaaatgtttctttttcttttttgagtgtgcaatatgtaacatgtctaaagttagggcatttttcttggatctttttgcagactagctaattagctctcgcctcaggctttttccatatagtttgttttctttttctgtcttgtaggtaagttggctcacatcatgtaatagtggctttcatttcttattaaccaaattaacctttcaggaaagtatctctactttcctgatgttgataatagtaatggttctagaaggatgaacagttctcccttcaactgtataccgtgtgctccagtgttttcttgtgttgttttctctgatcacaacttttctgctacctggttttcattattttcccacaattcttttgaaagatggtaatcttttctgaggtttagcgttttaagccctacgatgggatcattatttcatgactggtgcgttcctaaactctgaaatcagccttgcacaagtacttgagaataaatgagcattttttaaaatgtgtgagcatgtgctttcccagatgctttatgaatgtcttttcacttatatcaaaaccttacagctttgttgcaaccccttcttcctgcgccttattttttcctttcttctccaattgagaaaactaggagaagcatagtatgcaggcaagtctccttctgttagaagactaaacatacgtacccaccatgaatgtatgatacatgaaatttggccttcaattttaatagcagttttattttattttttctcctatgactggagctttgtgttctctttacagttgagtcatggaatgtaggtgtctgcttcacatcttttagtaggtatagcttgtcaaagatggtgatctggaacatgaaaataatttactaatgaaaatatgtttaaatttatactgtgatttgacacttgcatcatgtttagatagcttaagaacaatggaagtcacagtacttagtggatctataaataagaaagtccatagttttgataaatattctctttaattgagatgtacagagagtttcttgctgggtcaataggatagtatcattttggtgaaaaccatgtctctgaaattgatgttttagtttcagtgttccctatccctcattctccatctccttttgaagctcttttgaatgttgaattgttcataagctaaaatccaagaaatttcagctgacaacttcgaaaattataatatggtatattgccctcctggtgtgtggctgcacacattttatcagggaaagttttttgatctaggatttattgctaactaactgaaaagagaagaaaaaatatcttttatttatgattataaaatagctttttcttcgatataacagattttttaagtcattattttgtgccaatcagttttctgaagtttcccttacacaaaaggatagctttattttaaaatctaaagtttcttttaatagttaaaaatgtttcagaagaattataaaactttaaaactgcaagggatgttggagtttagtactactccctcaagatttaaaaagctaaatattttaagactgaacatttatgttaattattaccagtgtgtttgtcatattttccatggatatttgttcattacctttttccattgaaaagttacattaaacttttcatacacttgaattgatgagctacctaatataaaaatgagaaaaccaatatgcattttaaagttttaactttagagtttataaagttcatatataccctagttaaagcacttaagaaaatatggcatgtttgacttttagttcctagagagtttttgtttttgtttttgtttttttttgagacggagtcttgctatgtctcccaggctggagggcagtggcatgatctcggctcactacaacttccacctcccgggttcaagcaattctcctgcctcagcctccagagtagctgggattacaggcgcccaccaccacacccggcagatttttgtatttttggtagagacgcggtttcatcatgtttggccaggctggtctcgaactcctgacctcaggtgatccgcctgccttggcctcccaaagtgttgggattacaggcatgagccactgcgcctggccagctagagagtttttaaagcagagctgagcacacactggatgcgtttgaatgtgtttgtgtagtttgttgtgaaattgttacatttagcaggcagatccagaagcactagtgaactgtcatcttggtggggttggcttaaatttaattgactgtttagattccatttcttaattgattggccagtatgaaaagatgccagtgcaagtaaccatagtatcaaaaaagttaaaaattattcaaagctatagtttatacatcaggtactgccatttactgtaaaccacctgcaagaaagtcaggaacaactaaattcacaagaactgtcctgctaagaagtgtattaaagatttccattttgttttactaattgggaacatcttaatgtttaatatttaaactattggtatcatttttctaatgtataatttgtattactgggatcaagtatgtacagtggtgatgctagtagaagtttaagccttggaaataccactttcatattttcagatgtcatggatttaatgagtaatttatgtttttaaaattcagaatagttaatctctgatctaaaaccatcaatctatgttttttacggtaatcatgtaaatatttcagtaatataaactgtttgaaaaggctgctgcaggtaaactctatactaggatcttggccaaataatttacaattcacagaatattttatttaaggtggtgctttttttttttgtccttaaaacttgatttttcttaactttattcatgatgccaaagtaaatgaggaaaaaaactcaaaaccagttgagtatcattgcagacaaaactaccagtagtccatattgtttaatattaagttgaataaaataaattttatttcagtcagagcctaaatcacattttgattgtctgaatttttgatactatttttaaaatcatgctagtggcggctgggcgtggtagctcacgcctgtaatcccagcattttgggaggccgaagtgggtggatcacgaggtcgggagttcgagaccagcttggccaaaatggtgaaaccccatctgtactaaaaactacaaaaattagctgggcgcggtggcaggtgcctgtaatcccagctacctgggagtctgaggcaggagaattgcttgaaccctggcgacagaggatgcagtgagccaagatggtgccactgtactccagactgggcgacagagtgagactctgtctcaaaaaaaaaaaaaaaatcatgctagtgccaagagctactaaattcttaaaaccggcccattggacctgtacagataaaaaatagattcagtgcataatcaaaatatgataattttaaaatcttaagtagaaaaataaatcttgatgttttaaattcttacgaggattcaatagttaatattgatgatctcccggctgggtgcagtggctcacgcctgtaatcccagcagttctggaggctgaggtgggcgaatcacttcaggccaggagttcaagaccagtctgggcaacatggtgaaacctcgtttctactaaaaatacaaaaattagccgggcgtggttgcacacacttgtaatcccagctactcaggaggctaagaatcgcatgagcctaggaggcagaggttgcagagtgccaagggctcaccactgcattccagcctgcccaacagagtgagacactgtttctgaaaaaaaaaaatatatatatatatatatatatgtgtgtatatatatatgtatatatatatgacttcctattaaaaactttatcccagtcgggggcagtggctcacgcctgtaatcccaacactttgggaggctgaggcaggtggatcacctgaagtccggagtttgagaccagcctggccaacatggtgaaaccccatctctactaaaaatacaaaacttaagccaggtatggtggcgggcacctgtaatcccagttacttgggaggctgaggcaggagaatcgtttaaacccaggaggtggaggttgcagtgagctgagatcgtgccattgcactctagcctgggcaacaagagtaaaactccatcttaaaggtttgtttgtttttttttaatccggaaacgaagaggcgttgggccgctattttctttttctttctttctttctttctttttttttttttctgagacggagtctagctctgctgcccaggctggagtacaatgacacgatgttggctcactgcaacctccacctcctgggttcaagcgattctcctgcctcagcctcccaagtacctgggattacaggcacctgccactacacctggcgaatatttgttttttttagtagagacgggcttttaccatgttaggctggtctcaaactcctgacctcaggtgatctgcctgccttggcctcccaaagtgctgggattacaggtgcaggccaccacacccggccttgggccactgttttcaaagtgaattgtttgttgtatcgagtccttaagtatggatatatatgtgaccctaattaagaactaccagattggatcaactaatcatgtcagcaatgtaaataactttatttttcatattcaaaataaaaactttcttttatttctggcccctttataaccagcatctttttgctttaaaaaatgacctggctttgtatttttttagtcttaaacataataaaaatatttttgttctaatttgctttcatgagtgaagattattgacatcgttggtaaattctagaattttgattttgttttttaatttgaagaaaatctttgctattattattttttccaagtggtctggcattttaagaattagtgctaataacgtaacttctaaatttgtcgtaattggcatgtttaatagcatatcaaaaaacattttaagcctgtggattcatagacaaagcaatgagaaacattagtaaaatataaatggatattcctgatgcatttaggaagctctcaattgtctcttgcatagttcaaggaatgttttctgaatttttttaatgctttttttttttttgaaagaggaaaacatacatttttaaatgtgattatctaatttttacaacactgggctattaggaataactttttaaaaattactgttctgtataaatatttgaaattcaagtacagaaaatatctgaaacaaaaagcattgttgtttggccatgatacaagtgcactgtggcagtgccgcttgctcaggacccagccctgcagcccttctgtgtgtgctccctcgttaagttcatttgctgttattacacacacaggccttcctgtctggtcgttagaaaagccgggcttccaaagcactgttgaacacaggattctgttgttagtgtggatgttcaatgagttgtattttaaatatcaaagattattaaataaagataatgtttgcttttctatttccttttgaatttgtgtttattgttaattcatagctattcaaagtgtgattagagctgggcttggtggcttgcatctacagttccagctacccaggaggcagaagcaggaggattgcttgagcctaggagttcgaggctgcagtgagctatgatcctgccactgaattctagcctgggcgacaaaacaggaaaaaagtatggatggaggaccagcagcatctgtatcacctgtgagtctttcagaaatgcagagtttcaggctacactcggacctactgaatcagaacttgcactttttacaagatccccaggacactaaagtatagagtgaagcttgagaagcgctgttgtgtggattgttcttaaccagctgcagtgatgaatatgaataacgcaggccagcacagtccattgatattctattccagcttactgcctgccaaaaggtccattattactggatcctcagtcttttccaagagaagctaagaattccaaatttttatttgaaatatattttttaaatgtttgttcaactggcccagtgccagtggctcatgcctttaatcctagcactttgagaggccgaggtggaaggatcacttgaccccaggagtttgagaccagcctgggcaacataaagagaccccatctctattaaaaaaaaatagagacaatgctgccttaaaaaagtcaaataaatgtttgctcaactgatttttaatactgagggccaaacaaagcacatcaaatttttaagtgctgcttttcctcattttatccaactctggacaccagaatccaaatgtagtgattggaatccacctagactgattgaggaatatattgtcctcaaattttatgagggttgactattcattttaactttaattaggattgggcacaaattttgaaacataataacattacaggaccggggcccgatccagaccccaagagagggttcttggatcttgtgcaagaatgaattcagggcaagtccataaattgaaagctagttcattaagaaagtagaggaataaaagaatggctaccccataggtagagcagccctgagggctgctggttgccatgtccacccccgcgccccctccccccgctttgttgttgttgtttaagacagagcttcgctgtgtcatcaggctggagtgcagtggcatgatagctcactgcaacctctgcctcccgcgttcaagcaattctcctgcctcagcctcctgagtagctgggactacaggcgtgcaccaccacgcccagctaatttttgtatttttagtagagatgcggtttcaccatgttggccaggaaggtctcaatctcttgacttcgtgatccacccgccttggcctcccaaagtgctgggatgagccacctcgcctggctggttatttcttgatgatatgctaaacaaggggtggattattcatgcctgccctttttagaccatttagggtaacttcccggcattgccatggcatttgtcaactgtcatggtgccaatgggagtgtagcagtgaggaggaccagaggtcactttcatcaccattttggctttttcagccggcttctttactgcaacctgttttatcagcaaggtttttatgatctgtatcttgtgcagaccttctatctcatcctgtgacttagaatgccttaaccatctgggaatgcagcctagtaggtcttggcctcattttaccaaccccctattcaagatggagttgctctggttcaaatgcctctgatatttccctactcccttttataagaaaacccttaatcctaagggttgcagagggatgaagatccatcttctgtattcttcaggctgaataggggtgatgatattcctgcctatgagagtctcttgtattagggtagagaggagctcagtcagtcagtatggctccctatccttcctcccttccccagcccctgacaactaccattctactttgtctctatgattctaagtatctcctataagtggaatcattcagtatttgtagggtttttttgtgactagtgtatttcacttagcatgtcaaggttcatccatgttgtagcatacgtccaaattttcttctttttaaaaactgaataatattccattgtatgatatatgcacattttgcttattcatttatccatcaaagaaaaccagtagcttttttacataccggcagtaacctggttaaaaaaataagatggaaaataccaagcccgaaaatgtcaaattcttgaataccagacaggtactataatccaagctgagcagagaggaatggcccttgtctcagccctgagccacatgtcactacatgggccccaaggagctcttgtgcccagagtcctgctaaggctcgttcttcacccctctaaagtggctcaaactagcgtaggaggccaggagggagcagattctatgccacctccattgcttccgtgccttctccagatccattttttccaaaagctgtgtttgaattctgcacaggggcatctctgtctccaacactgaaaccccttttgccagacccagagaagatttaactgcctttttttttgagacagggcctcgttctgtcacctaagctggagtgcagtggcacgatcttggctcacggcaacctctgcctcctgggctcaagcaattctcctgcctcagccacccgaatagctgggattataggcgcaggccaccacatccagctaagttttgtatttttagtagagacgcagttttgccatgttgcccaggctggtctagaacttctgagctcaggtgatccacccgcctcggcctcccaaagttctgggatgacaggcatgagccacctaacctggccagatttaactgctttgagccaccgtctcacacatcttccaggagcttctagtcaaatgcagaggattaatagtgtataattccatttacataagatctttggaatagtcaaactcatagagacagaaagtagaatggtggttgccgggggatggttgaggggaaaattaggagttgtttaacgagtatggagtttcagtttgggaagatgaaaaaagttctggagatggacagttgtaatggctgcacaacaacgtgaatgtacttaatgccggtgaaccgtataaccatttaacaactgaaaatggttacaaaattttgtgttatatatatcttatcacaataaaaaatatagaggattgatcactatatttgctcccttccaaaatctcacctaggttaaagtaaagaaaaatatataaacccacaagaacacagggaccaggagaggagatgcattcattggattacgtttggttgtaaaaaaaacaaaaaatcctccccggcacggtggctcacaccttgtaatcccagcactttgggaggctgaggcaggcggatcacgaggtcacgagtttgagaccagcctgaccaacatggtgaaacctcatctctactaaaaatacaaaaattagccgggtgtggtggcgtacgcctgtaatcccagctactgaagtggctgagacaggagaattgcttgaacccgggaggcggaggttgcagtgagccgagatcacgccactgcactccagattaggtgacagaacaagactccatctcaaacaaaaacaaaaacaaaaacaaactaatataacagtgactttacatgctatgggttttttttctcctctcatcttcaagaaatgtggagactgccagtccggggatgatacagcatcacagtgtcaggaatctgctctttctgtataattgttacaggaaaggggtccggatccagaccccaagagagggttcttgaattcagggcaagtccacagtgcaaagtgaaagcaagtttactaagaaagtaaaggaataaaaaaatcgctactccatagacagagcagccctgagggctgctggttgcccatttttatggttatttcttgatgatatgctaaacaaggggtggattattcatgcctcccctttttagaccatatagggtaacttcctgatgttgccatggcatttgcaaactgtcatggtgctggtgggggcgtagcaccaaggaggaccagaggtcactcttgtggcctttgtggttttggtgggttttggccagctcctttactgcaacctgttttatcggcaaggactttatgacctgtattttgtgttgaccttgtatctcatcctgtgacttagaatgccttaaccatctgggaatgcagcccagtaggtttcagcctcattttacccagctcctattcaagatggagttgcagccgggcacggtggttcatgcctgtaatcccagcactttgggaggttgaggcgggtggatcacaaggtcaagagttcaagaccagcctggccaacatggcaaaaccccatctctactaaaaatacaaaaattagccaggcgtggttggtgtgcgcctattatgccagctacttgggaggctgatgcaggagaatcacttggatctgggaggcggaggttgcagtaagcagatatcgcgccatgcactccagcctggatgacagagcaagactccgtctcgggggaaaaaaaaaccaaaatggagttgctctggtttacaggcctctgacataatggctttatgtacatggcttccatggctagggtcagctcatagatctaatatggctgtgttggtgctcatgttgcagcccagcaatcagaaagagaaaggaggctgggtttggtggcttacacctgtcatcccagcatttcgggaggccaaggcgggaggatcacatgagcccatgagtttgagaccagcttgagcaacacagggagacctcatctctacaagaaataaaaataaattagttgggtatggtggcatgcacctgtggtcccagctattcgggaggctgaggtgagaggataccttgagcctggaggtttgaggctgcagtgagctatgatcgcaccactgcactccagcctgggcaacagagtgagaccccatctcaaataattaaaaaaaaaaaaaagaaagaaagaaaaaaaaaaggagagcagaaaaaggctatgtaccttttctttcgggttaccttctcaaagttgtgcatactacttccgtttacattacattggccagaacttaacatgacaactactagctacaaggtggtttttattctgggttgccatgcatcttagcttaagtaccctacaggtcctgagataatgattcctatgaaaatgattatttacttatttaattaatttattttgagatggagtctcactctgtcacccaggctggagatcagtggcgtgatctcggctcactgcaacctctgcctcccaggttcaagcaattctcctgcttcagtctcccgagtagctgggactacaggcatgcgccaccatgcccagcttttttgtatttttagtagagacggggtttcactatgttggccaggctgatctcgaactcctgacctcaggtgatctgcctgcctcggcctcccaaagtgctgggattacaggcgtgagccactgtgcctggctgaaaatgattttttaaaagtgttccaggaggaaatggaaagggcataggggagtaagaaagtggaaataggaaaagaaggaagccaagcaagaggagcctatcaagcaaagcctcagtcctgcagacagtctggaggcaggatattcacatcttagagttgtccaaaacagaacaggcaagctgcataattttcaactctggctgaataaggttgcatttcagctctctgggcacctggaaagtatgggctccagtaacctggaggcagtctgctgactgctggctggtgtgcacaaaagtggtaaagggatgagggagtgcaatatgggcactggcatcttggctgtcatgcatccaggtaaaaagtggaggctcaattactatatatgaaggggagaacagactttggggaacaattagcagtcatttccaggtgagacaacaacagaagagaaatgctaatttttttttttttctttgagatggagtttcgctcttgttgcccaggctggagtgcaatggcgctatatccagctcaccgcaacctccgcctcctgggttcaagtgattctcctgcctcagcctcccgagcagctgagattacaggccaccacacccagctaattttgtatttttagtagagacggggtttctccatgttggtcagggtggtctcaaactcccaacctcaggtgatccgcccgcctcagcctcccaaagtgctgggattacaggcgtgaaccaccgcacccggcgagagatgcgaacattttttttgttttttggaggatgacaagttgatgcaggaatgagcagaaccaggaggctgaatactgagtgttaaagagttcctagcaatatgcaggaaaggaaagcaacaagtatcctgagaggtgggggttagatgtagactgaaatcaggaggtgtggttaaaactctttgaaagaggctgggtgcggtggctcacataatcccagcactttgggaggccaaggcgggtgcatcatgaggtcaggagttcgagaccagcctgaccaacatgtgaaaccccgtctctactaaaaatacaaaaattagccgggcatggtggcgcatgcctgtaatcccagctactaaggaggctaaggcaggagaaccgcttgaacctgggaggcgaaggttgcagtgagccgagatcatgccattggactccagcccaggcgacagagagagatcccatctcaaaaaaaaaaaaaaaaaaaaaaaaaaagaaaggaaaagaagaaaagaaaaaagaaacagcagattccctagagaggagacattcatcactaaaaaaaaaaaaaaaaattaaaataaatcgcagaagtaaaagccctttttgaaagggctcagggtacccagcttaatgtatgaaacaaaagcaaacccacatcaaagcacaccattattaatttcagagcatcagaaataaagagaagatctgacaagcttcttggaagaaaacaaggcatagagaataatcagagtagagtagagcaggaaaacagagtcctgggtagagcgaactgagcctagccaatcgatagaattcttgatgttttgttgaaaacagaagcactttacaattctcttggtaagttttagaaagattctgtagtaatggaaaattgtacaaatttaaaaaatggaatctgttaacttcaggaagaacaaaaggtagaaaaatcaaggcaatataatcttggtacaacatttgacttagctgcaatgaataagacttacatagtcatagaaggtaaacactgattacttactttaccaaaaattatgatatcatcatattgaaagcccagaaggaagggaaataaagggaaatacaagagtgctaaatcttttatttttcaataagttggtaatgtctaaaattaataagaaaatggcaaccataagcctaatgcttagaaattcagaaaagtatcagactaaattttaaagtctactttaaactgagtctttgctttatagttgcataaataaattcattttgatggttttctcagaacagatgaactggctgggtgcggtggttcatgcctgtaatcttagcactttgggaggccaaggccgatggctcacttcaagtcaggagtttgagaccagccaaaaaattagccgggtgtggtggtgcacgtttgtaataccagctactcaggaggctgaggcaggagaatcgcttgaacctgggaggcggaggttgcagtgagccaagatggaacgactgcactccagcctgggtgacacagtgagactccgtctcaaaaaaacacaaagaacagatgaactgttttcctttgaggaatattgatgatcccactgcttgagtaatggaaaccagcttgcagctgatagttattttttgtcttttttcctgttctatccactgtcctaggtttggaatttcagctgggcagcttcgatcccaccacctgtagccactgaggttcacaggctctgtttgaggtgttgtgttagattgtgctgggttggttttgctgcttattgagtgatgaagagcaacatattagctactgagatattttgcagaaaaaggaagagatgtcttcagctcaaatgctatcaaacttgtatgtcttttaactttttattataaaaaatttcaaacatatgcaaaagcaaaagactagtttaatgaaccttatgtacccaccacccagtttcaacaattatcagttcctgacaattcttgtttcacctatcccacctctattatacacacatacaaacacacagacaccacacacacacacacacacacacacacgagagcaaagtcaacttccattattttgaagcacatccaagacatcacatcacattatttatcacattatttattaagtttcttcagtcacagtccatctcacagaaagaaatcccccatgagaaacttttaggacatagcttttatgttaattacttaatttctgcactagccatccttgcctgccttctaattttctgcactagctatccttaccttccttctaattttctaacctgccaaggattctgctgcctcaaggtatttgtttctttctgcctggattgctctttcgcagatacttacatgtctcattctttttcacccaggtgaaataaacagcgttgttgctcacacaaagcctgtttggtagtctcttcacatggacgcgtgtgacatttggtgctgaagacccgggacaggaggactccttcaggagacgggtcccctgtccttgccctcactccgtgaggagatccacctacgacctcgggtcctcagaccaaccagcccaaggaacatctcatgaatttcaaatcgggtaagcggtcttttccatcctctcttgctacccttcaatctccctctctcgctacccttcaatctccctgtccttccaattccagttctttttcctctctagtagagacaaaggagacacattttatccgtggacccaaaattccggcgctggtcacggactcaagaagacagtcttctcttggtgtttaatcactgcagggacgactgcctgattattcacccacactccattggtgtctgatcaccgtgggggtgcctgtcttggtcattcacccacattcccttggtggcaagtcaattgcggggacgcctgctttggctgctcacccacccccttctccgtgtctctacctttctctttaaacttacttccttcactatgggcaacattccgtcctccattcccccttctactcccttagcctgtgttctcaagaacttaaaacctcttcaactcacacctgacctaaaacctaaaagccttattttcttctgcaataccgcttggccccaatacaaactcaacagtagttccaagtggccagagaatagcactttggatttgtctgtcctacaggatctagataatttttgttgaaaaatgggcaaatggtctgaggtgcctcagatccaggcattcttttacacactggtccctccctagtctctgctcccagtgcgactcatcccaaatctttcttctttctctcctgtctgttccttcagtctccaccccaagctccgagtcctttgaatcctccttttctatggactcatctgacctctcccctcttccccaggctgctcctcaccaggctgagccaggtcccaattcttcctcagcctccggtcccccaccctataatccttttatcaccccctcctcacaccgtgtctggcttacagtttctttctgtgactagccctcccctacctgcccaacaatttcttcttaaagaggtggctggagctgaaggcatagccaagggtaatgctcctttttctttatctgacctctcccaaatcagttagcgtttaggctctttttcatcaaatataaaaactcaacccagttcatggcctgtttggcaacaacccttggacactttaccgccctagacccagaatggccagaaggccgtcttattctcaacatgcattttattacccaacccactcccgacattagaaaaagctccaaaaattagattccggccctcaaaccccacaacaggacttaattaacatcaccttcaaggtgtacaataatagagtagaggcagccaagtagtaacgtatttctgagttgcaattccttgcctccactgtgagacaaaccccagccacatctccagcacacaagaccttccaaatgcctgaactgcagcggccaggcattcctccaggactgcctaccccaggatcttgcttcaagtgccggaaatctggccactgggccaaggaatgcccccagcccaggattcctcctaagccatgtcccatctgtgcaggaccccactggaaatcggactgtccaacccggcagccactcccagggcccctagaactctggccaaaggctctctgactgactccttcccagatcttctcagcttagcagctgaagactgatgctgcctgatcgccttggaagccccctggaccattacggatgctgagctttggataactcttacagtagagggtaggtccatcccctgtttaatcgatatgggagctacccactccacattaccttcttttcaagggcctgtttcctttgcccctataactgttgtgggtattgatggccaggattctaaaccccttaaaactcccccactctggcaccaacttggacaacattcttttatgtactcttttttagttatccccacctgcccagttcccttattaggccaagacattttaaccaaattatctgcttccctgattattcctggactacagccacatctcattgccacccttcttcccaacccaaagcctccttcgcctcttcctctcgtatcccccaaccttaacccacaagtatgggacacctccactccctccctggcaaccgatcaaacacccattactatcccattaaaacctaatcacccttacctggctcaatgccactattccatcccacaactggctttaagaggactgaagcctgttatcactcgcctgctacagcatgggcttctaaaacctataaactcttcttacaattctcccattttacctgttcaaaaaccggacaagtcttacaggttacctcaggatctggatcttatcaaccaaattgttttgcctatccaccctgtggtgcccaacccatacacttgtttgtcctcaataccttcctccacaactcactattccgttcttgatctcacagatgcttttttcactattccctacaccactcatcccagcctcttttgcttttacctggactgaccctgacacccatcagtcccagcagcttacctgggctgtactgccgcaaggcttcagggacagccctcattacttcagccaagctctttctcatgatatactttctttccatcccttcgcttctcaccttattcaatatattgatgaccttctactttgtagcccctcctttgaatcttctcaacaagatacttttcaacatttattctccaagggatatcggatgtccccctccaaagctcaaatttcttctccatccgttacctacctcagtataattcttcataaaaacacatgtgctctccctgctgatcatgtctgactgatctctcaaaccccaacaccttctacaaaacaacaactcctttccttcctgggcatggttggatacctttgcctttggatacctggttttgccatcctaacaaaaccattatataaactcacaaaagcaaacctagctgacctcataaatcctaaatcctttccccactcccctttccattccttaaaaaacagccctaaaagctgctcccacactagctctccctaactcatcccaacccttttttcattacacacagctgaaatgcagggctgtgcagttggaattcttacacaagagccaggaccatgccctgtagcctttctgtccaaacaacttgaccttactgttttaggctagcccccacattattcctgataccacacctgacccccatgactgtatctctctaatccacctggcattcactccatttccccatacttccttctttcctattcctcaccctgatcacacttggtttattgatggcagttccacctggcctaatcgccattcaccagcaaaggtgggctatgctatagtagtatcttccacatctatccttgaagctaccgctctgcccccctccactacctctcagcaagctgaactcattgccttaactcgagccctcgctcttgcaaaaggactacatgtcaatatttatactgactctaaatatgccttccatatcctgcaccacaatgctgttatatgggcagaaagaggtttcctcagtacgcaaaggtcctccatcattattgcctccttaataaaaactcttctcaaggccgctttacttccaaaggaagctggagtcattcactgcaagggccatcaaaaggcatcagatcccatcgctcagggcaatgcttatgctgataaggtagctaaagaagctgctagctttctaacttctgtccctcacggccagtttttcttcttctcatcagtcactcccacctattcaccgactgaaacttccacctatcaatctcttctcacacaaggcaaatggttcttagaccaaggaaaatatctccttccagcctcacaggcccattctattctgttgtcatttcataacctcttccatgtaggttacaagccactagcccacctcttagaacctctcatttcctttccatcatggaaatctatcctcaaggaaatcacttctcagtgttccatctgctattctactacccctcagggattattcaggccccctccctaccctatacatcaagttcagggatttgcccccacccaggactagcaaattgactctattcacatgccctgagttaggaaactaaaatacctcttggtctgggaagacactttcactggatgggtagaggcctttcccacagggtctgagaaggccaccacagtcatttcttcccttctgtcagaaataatttctcggtttggccttcccacctttatacagtccgataacggactggcctttactagtcaaatcacccaagcagtttctcaggctcttggtattcagtggaaccttcataccccttaccgtcctcaatcttcaggaaaggtagaacggactaatggtcttttaaagacatctcaccaagctcagcctccaacttaaaaaggactggacagtatttttacctcttgcccttcacagaattagagcccgtcctcgagaagctacagggtacagtccatttgaacttttatatggacgcactttcttgctcagccccaacctcgttccagacaccagccctctaggcgactatcttccagtcctctggcaggctagacaggaaatccaccaggctgctaatcttctcttgtctactccagattcccaactatatgaagacaccctagctggacgatcagttcttattaagaacctgacccctcaaactctacaacctcgatggactggaccctacttagtcatctatagtaccccaactgccgtccgcctgcaggatcctccccactgggttcaccgttccagaataaagctgtgcccatcggacaaccagcctaatctctcttcttcctcctggaagtcacaagtactccccactacttcccttaaagtcactctcatttctgaagaacagtaataacccttatgagcctaatacatcccttcattctattagctctattcatccttaccctactttttgcaacagggctttacacagtcaccccccctacttggactgaaccccaaaaacttgtcatccctactatcttctgtttactcatactcccattcactattctcaactactcataaatgccctaa

SEQ ID NO: 2 - DNA, 62956 bp, mfascicularis
agaatgtaatgatggctttttcttactaaattttcagtggaggaggaggagaaagaaagtaaatagttatatgaacacagtagaaagtacaaagtggaaaacaaaaagagtatcgaacccaggtgagtggtccaaacctccccccagaaacctaagaacccatagaaatgggtgggaagcggagaagatcctccagacagcaggtggcgatgtagcatcccccagaaggccctctaacagaaactaggaggacgcgctaccaaggtcacgtgtccccggcgttcactcgctcttcgcttcacgtgactcgcatcctcgcgggtgattggcctgcgtgcggcacgtgggcggggggaccagggcggggcggggtgggcggaggggagggacagggggcggagctggagggggtggttcggtgtgggggccgttggctccagacaaataaacatggagtccatcttccacgagaaagtgagtgtccgcgtgcggtggggagctgtctgccgcgcggtggcgggcgtggagcgcggcatcacagcctcccggagggctgggtggggtccgagtcgcccccatgccgatctcgccgggctaggggcgacgccgcaaccccccgcctcttcggctcggggaggggagcatcacctacgctcctacttcccccgcggcccccgccctgggagccgggagggagtatgggcggggccgggggcgtctcgggacacgggagcgcggtggcgcccagtggatttgcttcttcctttctaagtcactttccatagcttttcggaggattccttcacccctccccaatctttccctctccctagggtctagctacagtcacctctgggacacctccctcgacccctcctaccctactcctggcagaattaacttttctttctccagactgctcaattctatattggagtcttccctacatttagatctttgaggtcttgttcatgttttttcccctgcaccaggtccgcgagcctcccgagggaggagaccttggctcgcccactgtagggcctgacacttaggaagtgaagtaggaaacccgttgtgcccctaaacagggaagtcgtcacgagtttttattacgggatgtttgggtttggtttcttttggtactctcatctttccggagcaggcagccagctttgtttttaggtattaggagtggactggaatgattttgttgtggtctgcctagcctgctgtcactttaactcttcagtgaccatgcacttgaagatactgtttgtgacatgtggagaaactcctcgtttctcacatgctattatccatccatttgtatgtgagtgaagccttccccaggacaactttggcacatgatatcttgtttcataatagtatcatgtttggaaagagttgctggtaaggctattatttaataggaggagcaaagggtttttgttttattaaatgcttataaatgatcgtttatcccagacatttaaaattcacacacacagccgggcgcggtggctcacgcctgtaatcccagcactttgggaggccgaggcgggcggatcacaaggtcaggagatcgagaccatggtgaaaccccgtctctactaaaaaaaatacaaaaaatgagccgggcgcggtggcgggcgcctgtagttccagctactcgggaggctgaggcaggagaatggcgtgaacccgggaggcggagcttgcagtgagccaggatagcgccactgcactccagcttgggcgacagagcgagactccgtctcaaaaaaaataaaataaaataaaataaaataaaattcacacacacacaacaaataaagcaaagacaaaagaatacatttaccagatgtaaatctgtagtataaatcttttttttaatttttattttaaagatggcatctcattctgtcacccaggcaggtgtgcagtggagagatcatggctcactgcagccttgactccctaggcacaagcgatcctccctcctccgcctccagagtagctgggactacaggtgtatatcgccagggccagctaatgtttttggagagacaggggtctcgctgtgttgcccaggctggtctagaactcctggactcaggtgattctcccacctcagcctctcgaagtgctgtgattacaggcgtgagccactgtgcctggaacaaattgttaagtacaatgcttttcattgtagaaaacatctcggaaacttttgaaataggcagatttacagtgggggaggaaggcctcagtcgtatagttgtcactgattttttgacttgattgacatgatttataaatcatagacaatagagatttagttgcttggctgagtaaagtgtgtgaaaaatacacatgtactttcttaaaaacattttttttttgagatcgagttttgctcttgtcacccaggctagagtgcaatggcgcgatcctggctcactgcaacctctgcctccctgttcaagctattctcctgcctcagtctccctagtagctgagattacaggtgcccaccaccacgcccagctaatttttgtatttttagtagagacagggtttcaccctgttggccaggctggtctccaactcctgacctcaggcgatccactcgcctcggcctcccaaagtgccgggattacaggcgtgagccactgcacccggccatatttttgttattaattttcaaaggctttggtgtgggaccagatttcaacatggaaggccttaaacatgttccacactacttcctgagaatcagacaagatttttaacaatattgattgttacctagttgggacgcatttctactgaaccatgggatcaataaaagctgggtgctagccttgcgaaaatctacttacccgaaagaagtccctcttagtccgggtgcggtggctcacaccagcgctttgggaggcccaggtgggtggatcacaaggtcaggagtttgagaccagcctggccaacatggtgaaaccacgtctctactaaaaatacaaaaaattagccaggtgtggtggcaggtgcctgtaatcccaggtactcaggaggctgaggcaggagaatagcttgaacccaagaggcagaggttgcagtgagctgagactgcaccacttcactccagcctgggcaacaaagcgagactctgtctaaaaaaagaaaagaaaagaaaaaaaaaagagtccctctgaattatcagcatgtgtataggcctacagatacttcaggaatgtatttaccattatcattaacttgtatgtacatagcaagtgaagattcaacaatttagttttttgggcatactcaagagtatgcacctataaccatatggcccattgttaatctcctatacagtccattctaggaatgtttgggcttactgtgccatttttcagttcaccgccttcccctctgcaatatacctttaacccttgctaggtgctgggtttggagagccagagaaccaactttggccctagagaagctgggtaggtgggaatatctgcctacaaagggccttgcaaccacttcctcttggaaccttggtttcctctttctgagttgtcactttgagtaccctttattaagttagaatgtaaaaacagtttcgcactgatacatctacagtgcctgagatagggcctggcacagagtaagtactcaataaatatttgaatggggctgagcgtagtgagacctgtctctacaaagaatgaacaaaattagcccgggtgtgttagcacacgcctgtagtcatagctacttgggaggctgaggtgggaggattgcatgagtctgggaggtcgaggctgtagtgagccaaggtcacaccactgcactccagcctgggggacagagcaagatcctgtcccaaaagaaaaaaatgtatatatttgaatggataaagagaggtctttgagtttctgagatatatatggtgctgtttatctaaagtaaacaacttttctgtaaacattttaaggctttgcaggccagctgtagtctctgtcacacattcttatgtgtgcatgtttttcccaaccatctaaaattgtaaagtgcattcttagctaccagggcaggttaaatttggcccatgggctagagtttgccaacccctaacttaaacttttgtactaactttatgaccactaactactggatttttgttgtttgttttagttctggtgcctgctttctgtcttttttttttttaaatcacttctctttctgatgtttcttggtgcagtcactgtgccatttgtattggtgattttaatgtaatgcaaactgggaataataactaaacttgctgggattgtacataaagttattgaaaagatgctgagtattgactctgtggcattcattatgcccttttgtggttgctggattttagctgtctttaggatatttgagctttaggagaagccaaattctgtataaatgacttgaagtgctaatggcacagattttgaaacctctgcctgggtttgagtctcagctctgccttttactacttgtgtgatcctgagcaagttacttaggatccctgtcctctggtttcctcctgtgtagtggtggggataataacatagacataacctcagagttagagtgtagagaaggctccctggcagatagtgctgtagaagtactggccattgccattactcagatgcttgtgtttgctgatcctcatagtaaggcctcggagagcactaagaggaggtgagaatgctgctagattgacagcttgtccccagatagcccattcctgagagcatcttagctttatacctgatttgtgttgtagttagtagtgtctgtggtaattttaactagtttcaggttggtcttgaaaacctggaaaggttgggggtaaatgatttggtagcagttcccttgtgattttataaattatctttgtagaactgcagtgtgctaattctctgagcccaacacaatgaagtctgggcctaaaatcataggatttcttttattttttaaaatttttaattcatttcatgtcttttcttttcttctttttttttttttttttttgaggcggagtcttgctctgtcaccaggctggagtgcagtggcgtgaagtcagctcactgcaacctccgtctcctgggtttaagcgattctcctctcagcctcccgagtagctgggtctataggtgtgtgccaccatacccagctgatttttgtatttttagtagagacaaggtttctccatgttggccaggattgtctcgatctcttgacctcgtgatccacctgccttagcctcccaaagtgctgggattataagcgtgagctaccatgcccggcctattttttatttttttgaggcggagtgtcgctctgtcacccaggctggagtgcagtggtgcaatctcagctcactgcagcctctgcctcctgggttcaggtgattctcctaccttagcctcccgagtacctgggactacaggcgcctgccatcacacatggctaatttttgtatttttagaagagacagggtttcaccatgttggccaggcgggtctagaactcctgatctcaagtgacctacctgcctcggcctcccgaagtgctgggattacgggcatgagccaccattcccagccaaatcatgagatttcaatactgctgaactttgattatggcaaagtgaactactgctttgattaaagcttgatgagagaggtggctggggatagtttgagataagggcaaggcaggaaaatgcataatcttaggtgggctcattgtcattgtacaattcttttggtctgtgtggcatttgatctgtcctatgacttaagttacgtttatttttatttttatttttatttattttatttctttttgagagacatggtgttgctctgtcacccaggccagaatacagtggcacaatcatagctccatgtagccttgaactcctgggctcaagtgatcctcccactcagcctctcaaacagttgagattacggtatgaaccactgtgcctagccttaagtcatttttaaatttgtactgaacagtttgtcctttccttccattaaatcatattagaagtacagaacttgatatttcctgtagcaatacagtgtatctttgatgaagtttgatttcaaatacttatttttcataatttaaagctattttttatagagataattttaatcaaatatttggatgtcgctattgctatatgtgatattaagtatggtgaccatagtttgtaaactccaaactgacagcaggacaggaaatttgtgttagcaaaggcttttttcttactgtttgaattttttaaaaattaggtaccatacagagaggagcacacaaatcgttaagagtacggctcagtgaattctcacaaaatgaacatgtgtaaacagcaagtaacagaagatttacctgcatcctataacctcccattattcccttttctaggtactctctctccactgcactcccaacaaaaataacccctatgctgaattctgatatcataaatgagttttgcctagttttgagcttttgtgactggaatcgtacagtgtgtatacccttttgactctgtcctctttagtttaccattgtttgagagatttatccatactgttccaggtcgttgtagttaattcattcacattgttatgtagtattcctttgtgagtaaacacaatttccattctgctgtgatcccagctatccatttgggtcgtttccagtttagggaccattacaaatagtaatgctatctgtaatgctattttgtgttactacaaatagtaatgctatttgtagcacaaaaatagtgcttttgtgaacattctttttttttttttttttgagacggagtctcgctctgtcacccaggctggagtgcagtggccggatttcagctcactgcaagctccgcctcccgggttcaccccattctcctgcctcagcctccggagtagctgggactacaggcgcccgccacctcgcccggctagttttttgtattttttagtagagacggggtttcaccgtgttagccaggatggtctcgatctcctgacctcgtgatctgcccatctcggcctcccaaaatgctgggattacaggcttgagccaccgcgcccggccctacattcttatacatatcttttgatgaatatatgtttgcatttctgttgtttacattatgtacctactaatggaattgctagatcataggagatgtacatgttaagctttagtagatgcattacataattattagttattattggttataccaatttactctctcaccagtagtatacaacagtttctatatctctgatctccaatattttagccattttagagtttgtgtaataacacattgtggttttaatttacatttccctgatgactaatgaagttgagtaccttttttgtgttctttatagctatttgactgtcttgtgaagtgcttgtttgtcttgccttttcttttctttctcccctcccctcccctcccctctttttgagacaggttcttgccctgtcatccaggctggagtgcagtggtgcaatatcagcttactatagcctcaacctttttggggctcaggttatcctcctatctcagcctcccaagaagctggactacaagcacacaccaccatgctcagttaattttttaatttttgtagaaatggggtttcaccatgttgcccaggctggtctcaaacttctggactcaagtaatcctcctgccttggcctcccaaaatgctgggattacaggcatgagccaccgcagccagccttggctgtttttcaataggttataagtagaacatctgtatatcccttcaatttgcatatcattcagtaagagttgcactctggtagtagaaatatagaagaaagagaaagaagtggaaacaaaaagtctattttcatgagaagacttgggggctagtgttctctctggctccaagctacttattccttaccaaaagatgaggataaacttatctcagactcaggctgtctcaatgctgtcttcctattccattatacacatataacccatatttttttcaccagctgaattttgttcctagaaaattgatttatcaggaaaaaattccgtcttgcaaggtggttctctttagagtctactgtgtaacatagctcaggacaaattgtgtgatgtcagataagttgggttaaggaatagaccttattggggaaagagagaacttggagggccaaggttagcaggagaaggaaatgttctctcatctgctatcatttcaggaaggggcaaacctggtgtctgtgttcacagggagggatccatctatacgtgattctcccttcttaccaggtagcatgggaaagctactgctgtggggaggaggattacacacaggttactcggtaccaggcaccctggacttggattcaggctgccagttgtgtgagaaactgcccagcacttgaaggttctgaacccgtgggaggttgtacctacctcccataaggaggaagcctgtcgtcccgtgggagctgagcttgggtgcagtccctcttgctggcttgtccaggagtgagctccagggttgtttgggacagttctgctcattgcattacgctgcgtgtacattatctgtagagttccatgaagagaacttcagctctgtaactgcaagttttaacatggaacagaatttttctcacctgtattgattcttaagatttgaaattctgtcaacaagcatttaaattgtgtggagtgttttttttttttttttttttttttttttttttgagacagaaggctggagtggcagtggcatagtcttggctcactgcagtctgtacttcccaggttcaagcgatgctcatgccttggagtcccgattagctaggtgtacgggtgcacaccatcacactggctaatttttgtatttttagtagagacggggtttcgccatattggtcaggctcatctcgaactcctggcctcaagcaatccacccgccttgacctcccaaactgctgggattacaggtgtgagccaccatgcttgaccggcattatgttaaaagaataaatgttctaggcagctaggcacagtggcatgtttctgtagtcctagctgctcgggaggctgaggtaagaagatcccttgggccctggagttcaagtccagcctgggcaacatagtcagatctcattttttaaataaataaataactgttctagagactaaaatttcctttcaccattagtaatttactgtggaatctccaagaatgaacttattttaggtagtgaaaatgagggagactaaatgttttatacagtggtttttagtaaagtatgagatttgatgcatttgatagatgataatgtttttttgttttttgttttttgttttttttttgagacagagtcttgctctgttgcccaggctggagtgcagtggtgtgatcttggctcactgcaggctccgcctcctgggttcatgctattctcctgcctcagcctcccgagtagctgggactacaggtgcccgccaccacgcccggctaattttttgtattttttagtagagatggggtttcaccgtgttagccacgatggtcttgatctcctgacctcgtgatctgcctacctcggcctcccagagtgctgggattacaggtgtgggccactgcacccgaccgataatgtttgtttaaaataattcttaaatttttgatcatgtaatgtagtttcattaatagtagatttgtaaaataaatgttaacaaatgaaaatgcatgtacctatgttaattatacttatctaaagctgaaagttcagttcaactatgttaaaaaatagttggagccgggcacggtgactcacacctgtaatccgagcacttggagaggcctaggcgggtggatcacaaggtcaggagatcgagagcatcctggctaacacggtgaaaccccatcactactaaaaatacaaaaaattagccgtacgtggtggcggcgcctgtagtcccagctactcgggacgctgaggcagtagaatggcgtgaacccgggaggcagagcttgcagtaagctgagattgtgccactgcactccagcctgggtgacagagcaagactccgtctcaaaaaaaaaaaaaaaaaaaaagagttgcccaggcgcggtggctcacacctgtaatcccagcactttgggagactgaggcaggcggatcacaagatcaggagttcgagaccatcctggctaacatagtgaaaccctgtatctactaaaaatacaaaaattagccgggcatggtggtgcatgcctgtagtcccagctactcgggaggctgaggcaggagaattgcttgaacccaggaggcagaggttgtggtgagccgagagtgctccactgtactccagcctggacaacagagcaagactgtgtctcaaaaaagaaagaaaagttaatgattaaattatttaggggaaaatactgtgcaattctgtttaataagtcacattttaattttttcttttggaaatattagcaagaaggctcactttgtgctcaacattgcctgaataatttattgcaaggagaatattttagccctgtggaattatcctcaattgcacatcagctggatgaggaggagaggatgagaatggcagaaggaggagttactagtgaagattatcgcacgtttttacaggtactgatgttaaactcactaagtcacattttctttttttttttttttgagacggagtcttgccctgttgtccaggctggagtgcaatggcgcaatctcagctcactgcaacctctgcctcctgggttcaagcaattctcctgcctcagcctcccaagtagctgggattacaggcacacgccactatgcctggctaattttttgtatctttgttagagacggggtttcaccatgttggtcaggttggtctggaactcctgatctcatgatccacctgcctcagcctcccaaagtgctgggattataggtgtgagccaccacacccggcttacatttcttttaaaaacgtagatactatttagaaaaggatgtgccattcttcctatagggatctgactggtgaattataactgcactgttaactttggaaatggaaatgcaaagatgttattttaaatatgcacgctaatgacagtttgtatccttctttccccacccccacgcgtgcttcaactacctgtcaaaattaacagcagccttctggaaatatggatgacagtggttttttctctattcaggtaagtagtcacaagcatctactatgtgttgcttacatcccaggccccgtttcacagcctttcaatagtcactataacaaggcgaccttcagaagttcttctaatagatcatgtctacagagtataagattatactctagatcactagattgtgatccacctgcctcagccttccaaagtgctaggattacaggcatgagccaccatgcccggccaactagagtactagatttttatatagataaacatgaaaggattgtagaatcttcatattagagtggggcatttaaaaattcctttttgagaaagattatttaatttgcatctggatgctaataataaccttaattctggccaggcgtggtggctcacacctgtaatcccagcactttgggagggcgaggtgggcggacctcagggtcaggagatcaagaccatcctggccaacatggtgaaaccctgtctctactaaaaatacaaaaattagctgggcgtggtgatgcaagcctgtaatcccagctactctggagactgaggcaggagaatcgcttgaaccagggagtcagaggttgcagtgagccaagatcgcaccactgcactccagcctggtgacagagcaagactctgtctcaaagaaaaccaaatacccttaattataataagtcccaatgtctcaaacttaccatttgttgggtaaacttaagaaaatgcagtaccttgctaccatccttttaaatcagcctaccagactggatttccttattatggtctgtggcttttgatttttctctttgagttctttggtggttatatatatgtacttgaaagattcttttatctgcgtgtctttcattcttttctgacactgtgagttgtatccagaggtctttcagaacctctcctgagcgacctatctctgcagatacctttgtttgtatttctcttgtactgccctcctggactcctcctcatccaccagcatttccatctagtgctttaccgtgccactgttaacaggtaattgctactgcagggctggaatcagaggtcagagtaggcccagcacttggcgtttcctatttgtgccttgctgctcttggtacccactgccttgcactcactttctgtctttgccggtacctggttgacttgcttctttgttggctaccttggagggtagatagtgaattttcagaaatttcccattttttgtcagacagattgaaataatcaggtttgcattttgtttttttctacaagtggcaagcccatgaccctggaagtctgatacctatggaaacttcagtttaagtgcccagggagaacttattttggtagacacgatttctgacattgcaagtagtaagttgaatatacattttctaaagtagcacccacggcagccaaattaccagatgtatatagtagactagttttaagaatagcacttatgggtagaatatacatacatctggatttttgagacagttttatgtaggaattgtgtggttttctggaacatctcagagacctggtatgaaaagcactcttctaatatatatgtgtatgttttttatggatttagtgatatatctatacacacacacacttttgaaaacctatagccggctgggcgtggtgactcatgcctgtaatcccagtactttgggaggccgaggcgggcacatcacaaggtcaggagtttgagaccagcctggccaacaaggtgaaaccctgtctctactaaaaatacaaaaattagctgggtgtggtggcgcatgcttgtaatcccagctactcgggagcctgaggtaggagaatcacttgaactcaggaggcagaggttgcagtgagccgagatcatgccactgtacttcagcctaggcaacagagcaagactctttgtcttaaaaaaaaaaaaaaaacaaaaaaaaacctgtagccttctagagaaatttatatatgaggtacacaactaacatagctatacttcttaaagtgtttacacaactgacatagctatacttcttcaatttggaatggagtggtttggcttatgaaaagttactatttttcttaacaggttataagcaatgccttgaaagtttggggtttagaactaatcctgttcaacagtccagagtatcagaggctcaggatcgatcctatgtaagattttgttttgcatttcatacatttcttttcccaaatttgatttttaaagatatttcttaaagaagagaaatataattggaatacttgtgttttgatgttccctgtttcattccctcagactttcctatttcacctttgtgatgtccatgagcatctgccctgtagccttcctggcaccccagtgtctgtggcagcacagagctgccccgtaagtggtgcgtgaggccatcttttggcccggcatcactaagctgctgcagagacgttcatatggttgtgtgatcttttaaaaacatcagtgacacttaactgtaaatctaatcttaaattatcacaaattttatataatgtttgccagtagacaacataagtatgaattcaatatttcaagttaatattgtgtgttttcttttttagaaatgaaagatcatttatatgcaattataaggaacactggtttacagttagaaaattaggaaaacaggtaacatttcttacccttccttgtctttttttcttatattgtgccccatttaaaactaaaatgtgggccagatgtggtggctcatgcctgtaatcccaacagtttgagaggcttaggttgggggatcacttgaagccagaactttgaaactagcctgggcaacaaagggaggtcctgtctcttattaaaaaaaaaaaaaaaaaaaaaaaaaaaagccaggtatggtggctcacatctgtaattccagctttcttggaaggctgaggcaggaggatcacttgagctcaggagtgtgaggctgcagtgaactatgattgtgccactgtaccccagcctgggtgacagagtaagactctgttttataaaacataaaaagaaaaagaaattttaaaattaaaaagaaaaaacaaaaggattgctgactttaaaattaggaaactgactagtaatgtgtgtgtttgtggcatggttatctatcttgatagatagaaatttgtcattttaaaacatatcagttttccttgtaaatttatttgtgacaagtatatgcaatttaactatatcataagaaaaattctatattaaatataatacaaatgtggttactttgaagtgggtttttatgtgatgactatgttctgtcagttaattactacatttgtagatttgtatttagcatagtgctgtcacaaagcctgaaatagtgtcaagcatgaataaagcattcaattatgcttgctttagtgtaagattattcatatgattccaaaagccatgtaatacatacgtctacataaaatcacttctatttgttaaataaaacatgaaatatgtcttgagcaagctattttaagaaacagaatcatttaacatcctttttattagaattttgaatctttgaaagagggttcttgaaaaccagctagcacagtaaaaaagaataaactagtgatacatgcagcaacatggatgaatctcaaaataattatgctgaaagaataaccccgaaacagaatactacatgctgtatggtatcatttattaaaagtctagaaaagtgcagattcatctgtagtgatgaaaagcagatccaccagtggttgcctggggatgaaaaggctaaggaagagtgagaggggggagggtcagagagaggcatgggaaacgtggcagtgattaatgtgtcacagtgttggttgtagtaatggtttcatgggagtacagtatacaaatgtcaaaacatttcaaaggccaggtgcagtggctcatgtctgtaatcccggcacttttggatgccacggcaggaggatcacttgagctcaaggagttcaggaccagcctgggcaatgtcacaagaccccatctctacaaaaaaatgaaaaaaaaaaaaaagaaaaattggctaggtgtggtgatacatgcatgtagtcctaggtgctagggaggatgaggagggagcccagaggtcaagcctgcagtgagtcatgatcgcactactacactccagcttgggtgacagaaggagatcctctctcaaaaaaaaaaaaagtttcaaattgtacactttaaatatgtgaagtttattatatatcacttataccccaataaagctgtttgtttttttaaaaaagtaaataaaagccaaaaaagatatgtcaagaaagtatattgaattaaatctataagagataattcaaaaacaaaaaccctattgttatcttttaagtcacccaaatcaaatttgggaaaagtcacctacttagcttcatcctaagttggttcgttctttctttctttctctctttctctctttctgatggattcttgctctgtcacccaggctggagtgcagtggtgggatctcggctcattgcaacctccgccacccaggttcaagcaattttcctgtctcagcctcccgagtagctgggactacaggtgtgcaccaccacacccagctaatttttgtatttttagcagagacggggtttctccatgttggtcaggctggtcttgaactcctgacctcaggtgatcctgtccatctctgcctctcaaatacagggaatacaggcgtgagccaccatgcccagccctaagttggttctttcttaaagttcttcctgaggagccaagagcaagttaaggaggtgtaatctagaagcttacagtggaggctagctgggtgcagtggttcacgcttgtaatcccagcactttgggaggctgaagcagggagatcactgaggccaggagcttgagaccggcttggaccaacacagtgaaaccttgtctctaccgaaaaaaaatttaaaaagtgcaacttagagcagtagaggctgacacgagtgggaatcacctctaggtaaaaaccagggtagggtactgctgagattatttaacctctgggttttatttacgtgtttttaaaaattatgatccagtattctttactttttttgtataaagtaagcactgaatttttaaggtctgtagacttagatttcagaagtaccctcgtattaatttgcaaataaatgtctatcttattattttgagagatttaaaaatttttagttcttcaaaattgaattttcacattttgaattacattatctttgacaaatacagatgatgttggccgggcgctgtggctcatgcctataatcccagcactttgggaggctgaggtgggtggatcacctgaggtcaggagttcaagatcagctttgccaacgtggtgaaaccccgtctctactaaaaatacaaaattagctgggtgtgttcgcgcatgcctgtaatcacagctacttggaaggctgaggcaggagaattgcttgaacctgggaggtggaggttttagtgagccaagatcacgccattacactccagcctgagcaataagagtgaaactctatctttaaaaaaaaaaaaaacaaaaaaaaaacaaatacagaagatgtcaaattttggtttattttattttctttggttctaatttatatttttgtttaaaactatatttttcactatagactctgtctgaggtccctgtataataaaaaagaaggctggaaaaagtattaacattgtcaaaatccaggaaaatagttggtcatgatactgacagtaactttaaacactttttgtatcttgtgggttaaattaggattactttgtggtagtgataaatgatgttaattagggccgagtgcagtggttaacacctgtaattccagcatgtagggagactgaggtgggaggatgtcttgaggccaggagtttgagaccagcctgtacaacacagagacccccatttctacaaaaaaaattagaaaattcgtcaagcatcttggtgcacacctgtagtcccagctatttgggaggatgaagcgagagaatcacttaagccaggggttcaaggctgcagtgagttatgattgcaccactgcactccagcctagatgaccatctctttaaaaaaaaatgtgtttatatgttatatgtgatagtgttttttaaaaacatttttaaattatagagggtctcactatgttgcccaggctggtctcaaattcctgggctcaagcaatcctcccacgttagcttcccaaagtgcttggattataggcatgagctgccatgcccacctaatttagtgatttttaaaaactgagttggtaattataaattatcttcctggaacttctgactttctcacaattggaatcttttgacaaaaattatcggtaatgggaaaactttgtatagttgtcatttttcctcccatcagtatgatagatgcgattagagttatgttggactgatactttgaaaaaagatttaactatagctattaataaagacatttcaactacggactatccatttttattcttttgggagggtttaatgtttatagtttaaagcaaagtgttgtttttaaaaaactatttaacagggccgggcgccatggctcacgcctgtaatcccagcactctgggaggccaaggcgggtggatcacaaggtcaggagatcaagaccatcctggctaacactgtgaaaccccatctctactaaaaatacaaaaaattagccgggtgtggcggtgtgcgcatatcgtcctagctactcgggaggctgaggcaggaggatggcatgagcctgggaggcggagcttgcagtgagccgagattgcaccactgtactccagcctgggcaacagagcgagactctgtctcaaaaaaaaaaaaaaaaagagtatctaacagaggccgggtgcagtggctcatgtttgtaatcccagaactttgggaggccaaggcgggaggatcatttgaggtcaggagtttgagaccagcctggtcaatgtggcaaatgtgctgtctctaactaaaaatacaaaaattagctgggtgtggtggcgcgggcctatagttccagcttcttgggaggctgaagcaggagaattgcttgaacctgagagacggaggttgcaatgatctgaggtcatgccactgcactccagcctgggtgatagaatgagactcttctcaaaaaaaaaaaaaaaaaaagtaatagtgataaatctgcagtattctcttttaagatattattcagtcagaggaaagagctcaacttgaaatatttccagagtttaaacaatcttactaaactttgatgggttatatctgttcttaacatgtgaaactactttattacctataatatgcactaacttaaatattgacaattttttttccagtggtttaacttgaattctctcttgacgggtccagagttaatatcagatacatatcttgcacttttcttggctcaattacaacaggaaggtaagtaaaggctgaaaattttgtaacgttatctttcgaagtagttaaataaactggagcattagatgacagtgtgacaatactgtttttctggcagtggcagtgaaacaatctttaggtttgacgtggtgataggctgtgatttgggtgacgctgttccattagagttctcactggcacctggccctccctcttctgaggatgctgctttctttgcagcccttctaagtaatggttttttcttttatacatcacataccacacagctgagaggagggatagatatttttcttttttgcctcttctaggccactgttcttccctataaactccagtttctttgaaatacatgcccctaagggccagttgtggtggctttcgcctgtaatcccagcactttgggaggccgaggcgggcagatcacgaggtcaggagatcaagaccatcctggctaacggggaaaccccgtgtctactaaaaataacaaaaaattagccagttgtggtggtggacacctgtagtctcagctatttgggagactgaggcaggagaatagtgtgaacccgggaggtggatcttgcagtgagctgagattgcgccactgccctccagcctgggcgacagagactccatctcaaagacgaaagaaatacgcgcccctagattaaactatcccttgcccttttgcactcatccaaaagtctcttttcatcagtgattttaggatctgactcattgtgtttttctctacttcaactccttttatcattcttaatgatttctgtattgctaatcaatccagtaatccagtacctacttcttagtttcaaaatcactcactcttgcttagctattaccaataatcataaccactgtcaaatctcaattgcaagcgtattactctttaactaccacctcctatccttaaaccatgttttatctgttttttttattccagccattctttaaaccctaccgtggggcccaagcatttcctttatatgcattcttcctttcttctgctgcttattttctgtaattcattgttataatcactccattgcattcttcagcttgtttcccccttctctccctccatcatacttgaatgacaaaaatctcaaccctggttaaaaccaaatcttggccttgtccattcctgtaccagagtagcaggatatggctaaaaaataacataaaacatgatgattggttttacttttttcttaaacgatctatccatccattcacccatccatctgtctatcaaagtgactaggcctctctgaagcccaggctggagtgcagtgacatgatcacagctcattgtagccccacactcctggcctcaagtgatcctcttgcctcagccttttgagtagctgggactacaggcttgtgctaccgcacctagctaaggttttactttaaatttattataatcacaaaattcagatgagcctttagtgctgcctgatatttctactatgttttcttagtaaatccccataccactctccaagatgtttataaaaaatcatgtaccactctccagacgtttataaaaaatcatgtgccactcttcagatgtttataaaaaatcatgtgccactttccaaggtgactaatttcacagcttctgtcttcaaacctttaaccactttcctctcccttccttacacaccttgcgtatggccttccattacattctgctgagaacatagaagcaattaaaattatgttcttacctttctaccagcaagtgtactaatttgcttatatcttcacctgtgctttgcgactactaaaatagatgaatggtcccctacctctagcgaagaccagtccctcacttgtgggctggatcccagctcctctcacctactcaagatgttcctgctttcatctctccactctcttgtataatcagttccccccccgccctttttttttttggtaatgtacctataagcagaaaaataagctttttaactccagtaattaaaaagaaaaatcttctcttaattccatgaaactccagctgcctccccatttttattttttccttaggattgtctctagtgtgccttctccttttcttgaactccgcctcctgggttcaagcgattcttctgcctcagcctcccgagtagctgggattacaggtgcgtgccaccacgactggataattttttctttttttttgagatggagtttcccttttgttgcccaggctggagtgcaatggcgtgatctcggctcactgcaacttctgcctcccgggtttaagcgattctcttgcctcagcctcccgagtagctgggtttacaggcatgagccaccacgcctggctaattttgtatttttagtagagatggaaggggtttctccgtgttggttaggctggtctcgaactcctaactgcaggtgatctgccacctcagcctcccaaagtgctgggattacaggcatgagccactgcgcctggcccctggctaagtgtttttttatttttatatttttagtagagacagggtttcaccatattggccaggttggtctcgaattccggcctcaggtgatctacctgcctcggcctcctaaagtgctgggattacaggcatgagccactgtgcctaaccatcttttagtaatggtatttagagatcacaatttgagtgctggcatgcttattgctactgggtttgttatgtagttattgtgaattcacatttaggaatatagagtttttaattctttgattttagatacttgtatcttttttcttttatagttaaaaccttggttcctaatgatatcccttcttaaaaaccctgtctgcccttgacctccagcccaccatgctgtggttttcctaacttgttgcctgcatctttcagatccctttcatggatcttaggtatatctctaaataagatctgtgtgtcagtaattaccaaacttttatctttagtcttgacatctaccctgaacacctagctttgactaactcctagctttggcatctccactttgaagtccaaaaagcatttcaaactgaacatgtctatgaaagacttattttttttttctatccatgctatctatcaggttttccatttccataagggtgacacttcttgtactctggttcctatatattatactgatagagccgctcagagtgcttcttaaccagtgtaatgcctgttatgtcccaccctcactccttgtctttcagtggcttcccagcacacttagaataaaatctgaagtcttaggctgagcgtggtggctcatgcctgtaatcccagcactttgggaggatgaggggcagatcacttgaggtcaggagtttgagaccagcctagccaacatggtgaaaccctgtctctaccaaaaaaaatacaaaaattaactgggtgtgatgttgtgcacctgtagtcccagctacttgggaggttgagataggagaatcacttgaacccaggaggcagaggttacagtgagccaagatcataccactgcactccagcctgggtgacagaacaagactctcaaaaaaaaaaaaaattgaaaagtaaaataaaatctgaagtcttgaataaaacccaagatcttgaccatgacccctgaacagggcagagtatccattcttcagacactcttcatagaataccatggtgagctggcatatttattgtacgatatagaaacagttttactggcagaaaacacattaaaccatttgaactctgaatacagttgtcctcataaaaaatgttcattgtactattttgaggttttccattagtagttcttacaatctttgtcccattatgtgttaattctaacaaaggatatccaataacaaacaccagagtttaagaaaaatgtgccaggtgcggtggctcacacctgtaatcccagcactttgggaggctgaggtgggcagatcacctgaggtcaggagtttgagaccagcctggccaacatggtgaaaccccatctctcctaaaaatacaaacattaaccaggcgtggtggcgggtgcctgtaatcccagctactcaggaggctgaggcaggagaatcgcttgaacctcctgggaggcagaggttgcaatgagctgagattgcaccactgcacttcagcctgggtgacagagtgagactccatctcaaataaaaaataataataataattaataatagaaaaacttagattgttttaggtatagcccactcttagtttttgtgtgtagcatctagcttggggaaaccctggatttctggaatcatatttatacacagtcacactagactaatgtaattcttttgggatgcaaaccacacgtttgacaccttaaatagcttttaggtatttggcttctcagctcctatttttagttacaaggggtgtacatgtgtgggtcagggtagctctttccacagatgattagttttagccatgttactagttattgcacacattatctgactgtgtcctcaaaacagccctgtgagtgtattagtcagggttctctagagggacagaactaataagatagatgtatatatgaagggtaatgtactaaggaatattgactcatatgatcacaaggtgaagtcccacaataggctgtctgcaagctgaggaaccaggaagcctgtccaagtcccaaaacctcaaaagtagggaagctgacagtgcagccttcagtctatggccaaaggcccaagagcccctggcaaaccactggtgtaaattcaagagtccaaaagatgaagaacttggagtctgatatttgagggcaggaagcatccagcatgggagaaaggtgaaggctcagcaagtctggtccttccacactcttatttctgcctgatttattctagccgagctggcagctgattagatggtgaccacccagattgagggtgggtctgcctctcccagttcactggcttaaatgttaatctcctttggaaacaccctcacagacacacccagaaacaataatttgtagccttcaatccaatcaagttgataatattaaccatcacaggaaggtaccagtatcattatgtttaacagtagaaaccaagacaaatgcagctaggaagtgggagaactgggatcagatgcaggcagtctgattctcaatcagttgctcttaccgactcctttactctctctcataccagtaagtgagtagcctgctcagtcaagtgctatattagtagggccctttacagacatttacttcgcacagtcactcagtgagacggctattccagtcttacaatggagaaagtgaggctcagagattttaagtaacttatcctagatgactttactagtaagtataagaatcattatttgaactaaaatctttctgaatcctcagcttgtatttttttccagtgtactgtgctgcctctttactagcattttacatcaattttgaatctctttactagctgtttaggttgatttttgcctttttgttttaggttattctatatttgttgttaagggtgacctgccagattgcgaagctgaccaactcctgcagatgatcagggtccaacagatgcaccgaccaaaacttattggagaagaattagcacaactgaaagagcaaaggtaaaaatgaggcctgcagtatggaacatatgacgatatttcattatgagaataaaattttcatgcttacattgaatatgtggtccttgtgttgtcggcacctctattttggaccttacattttagtgaagtttattagttcgaacgtgaatcaactctttgaaatacttaaatatattaactaagttagcaggtatggtgtattcctagcacttcaggaggctgaggcaggctgattgcttcaacccaggagtttgagaccagcctgggcaacatggcaaaacctcacctctacaaatagtacaaaaattagccagacgtggtggtgcgtgtctgtagtcctagctacttgggaggcagaggaggaaggatcacccaaaactggggaggtcgagactacagtgagccacaatcacaccaccgcactccagcctgggcaagagagtcagaccctgtctcaaaaaaagaaacagagaaaaaaaacttagttggattcaaattacaacacaatcattatattactagagcttatttgccagaaaacgttttaagttttggcttacgtaaagcctttacattacaaatgcctttatgttatgtctaaaatagaagattggttgcagttactaccagtgcttttgttctttagagtccataaaacagacctggaacgagtgttagaagcaaatgatggctcaggaatgttagatgaagatgaggaggatttgcagagggctctggcactaagtcgccaagaaattgacatggaagatgaggaagcagatctccgcagggctattcagctaagtatgcaaggtaaagacattctgatgtgtgttgtattcattgctgaagaattgattccaattattcttaggtttcctggaagttaatgtactcttagaagtgttttgacaattactgcagaagcaatagctatatagtgggctttccctttagatttcttataatggaaataactttttacaacctatattttattaggagtagttatatttttactcctggttatttatttggtttcaataacctgtactaacacagtagtcaattgtggtgttaatctttgtgggtatcagttgacccttacccaaatcagctctttcataaatgtatgtcattagacactatggaagggcctggacaggggatataaactgattatacaaaaagccaacatttattggctatgcaacttaaaccttaagcccgctttggtgggcccagttttttagtgatataaactatcaatttcaaaagtgaaaacatatcccctatacagtctaggcaaagaaaaatgttaagacatagctcgaagttgcttaattaaaagtttgaagtgggttttttgttttatttttctctaacttatgtgtatttgcttctactttctaatgaaattatttatcaattgatttccttagatatccagataaaattgagattccattaatgggaagattattttcatcctgaacttttcttgcctctaggcacacctctgagtactccatatggtgtgcaatcccatttttgattaatagagtcctgctggattagcagggacagaaatcagctttagatttcttttgttttttgaattaagagtctcactgtcgcccagcctggagtgcaacaatcttggctcactgcaacctctgccttccgggttcaagcgattctcctgcctcagcctcttgagtaactgggactacaggcacctaccaccatgcctggctaattttttgtacttttagtagagatatggttttgccctgttggccaggctggtcttgaactcctcacctcaggtgatccacctgccttggcctcccacagtgctgggattacatgtgtgagccaccacgcccagccagaagagtagaatattcttcaagaaaaaacattttaaaagcttactcaaatgaggataaacaaatgtattgttgcttgaattggtaaatacagtgattggtttttgttctgttgtgttttgttttcaggtagttccagaaatatatctcaagatattccacagacatcaggtacaaatcttacttcagaagagcttcggaagagacgagaagcctactttgaaaagtaaagtagttggtacaaattaaagtagcacgtttaatatttgctttggctattttgtctgtttgtaaatggttactgcctgaatcctatgaatatttgaatgcatatttaaaaaatttacagcaaataggacaggcacggtggcttacgcctgtgatcctagcactttgggaggccaaggtgggcagattgcctgaggtcaggagttcgagaccagcccaggcaacacagtaaaactccatctctactaaaaaatacaaaaaaattagccgggcgtggcagtgtgcgctgtagtcccagctgcttgggaggctcagccaggagaattgcttgaacccagcaggtggaggttgcagtgagccgagatcgcaccactgcactccagactggttgatacagtgagactgtctccaaaaatatatgtgtgtatatataaataaaaataaaaatttacagcaaataacatgaagcaaaatgtagttttaatgaaaaagtttgcctcaatactggataaatttttgaaactgagtgaaggaaaccttgtacaatttcatttattaaaagaaaaatgaaattaggacaaggcaagaagaatacctattgatcctttggatgtgcttcttgcttacctgattaaccctgcaaaatttctctaccaatcagtaagaaaaacagcttttgaggtatgggagcacattcccaaatagacatgggtagttcatttagctgctcatggctgctgcagggggtcctgtaggcctgttagcatcaggagaatggatgcaaaccataaatctggatcaactcctaaaactttaccttgtgcccagccttgtaagtgcttgctaaataggaattccactgtatgaaaatacattcttttcaagtaactatcattcagacttttgtcccccacttttttaaaaaaagaaaaagaaaaggctgggtgcagtggcttacgcctgtaatcccaccattgtatgaaataggaattccactgtatgaaaatacattcttttcaagtaactatcattcagacttttgtcccccacttttttaaaaaaagaaaaataaaaggctgggcacagtggcttatgcctgtaatcccaccattttgggaggccaaggcgggtctttgggagtgagtttttgggaggcaggagaatcgcttgaacccgggaggcggaggttgtggtgagctgagatcgcgccattgctctccagcctgggcaacaagagtgaaactccgtcttaaaaaaaacaaaacaaaacaaaaattagctgggcgtggtggtgggtgtctataatcccagctactcgggaggctgaggcaggagaatcgcttgaatccgggacgcagaagttgcagtgagctgagattgtgccactgcactccagcctggggacaagagcgagacctcgtctcaaaaaaaaaaaaagaaaaactccatgttaaaaattacaagataaataatcagacccgctgatcctaggtcagaaaacaaaagactcatagctgaatctgacctgccattgctgtatttcatccattctaagatgcacatagtttcacatttcaatgtctctgaaattgagaagtatcttacaatcataattgacagtatattagcagcacctaaaaatattggctcattttacatttgatggtataatgaagaaaatatttacctttttttctgttttgtttttaagtcacaactcagaagtagatgaaggaaaattctgatcagctgacatcctcttaatgtgagatatttctagtctttattcagcatagattaatggctaattatatgttacatttcaaagtagtgcttattagtgctttttacttttaagtttcaaaattaacttttttattaaactccaaatttatacaaaagtagaaaaactagcataatgaactcttgtttatcacccagattcaacaaatactagcacacggccaatcctgcttttttttttttttttttttttgaggtggagtcttgctctgttgcccaggctggagtgcattggcacaatttctgctcactgcaacctctgcctcctgggttcaggcaattctcccacttcagcctcccatgtagctgggattacaggtgcacaccaccatgcccagctaattcttatatttttagtagacacagggtttcaccatgttgcccaggctggtcttaaactcctgacctcaagtgatccacctgcctcggtctcccaaagtgctgggattacaggcatgagccactgcacctggcccagtctcgttttataatactcccatctcccattctttccactgtcccacctacaagtttggattattttgtaacaaatctcaatcatcatatcatttgttctataaccattttaatatatgtctctaaaatatatgaactttttttaacatagttaaatgctattgtcataaaataatcatgataattaattgtaattctatatcaccaattatctagttaatgtaaaaaataacttaaatctaaggccaggtgcggtggctcacacctgtaatcccagcactttgggaggcggaggcgggcgaatcacctgaggtcaggagttcaagaccagcctgaccaacatggagaaaccccatctctactaaaaacacaaaaaaatagctgggcgtggtggcgcatgcctgtaattccagctagttgggaggctgaggcaggagaatcagggagacagaggttgtggtgagctgagatcttgccactgcactctagccttggcaaaaagagtgaaactctgtctcaaataaataaataaataataaaaaaataacttaaatctacttaattagaaaaactaatattctggaaattttattttaagaaatatctaaattggccgggcacgatggctcacacctctaatcccagcactttgggaggctgaggcgagcagatcacctgaggtcagaagggtcaggagttcaagaccagcctggccaatgtggcgaaacaccgtcgccactaaaaatacaaaaattagctgggcatgatggcgagcccctgtaatcccagctactcaggaggctgaaacaggagaatctcttgaacccaggaggtggaggttgcagtgagctgagatcaccccactgcactccagcctggatgacagagtgaaactctatctcaaaaaaacaaacaaaaaaaagaaatagcaaaattaaaagaaagcatacatggccaggtgtagtggctcatgtctgtaatcccagcacttttggaggctgaggcaagcagatcatttgaggccacgagttcaataccagcctggccaacatggcgaaagcccgtctctcctaaaaatacaaaaaaattagtcgggcatggcggcgcacacctgtaattgcagctactttggaggctgaggcaggagaattgtttgaacccagaggtggaggttacagtgagctgagattgtgccactgcactctatcctgggtgacagagcgagactctgtctcaaaaagtaaaaaaggggccgggtgcggtagctcactcctgcaatcccagcactttgggaggccaaggcaggcagatcacaaggtcaggagatggagaccatcctggctaacacagtgaaaccccgtctctctactaaaaaatacaaaaaaaattagctgggtgtgatggcaggcgcctgtagtcccagctacttgggaggctgaggcaggagaatggcgtgaacccaggaggcggagcttgcattgagcagagatggcgctactgcgctccagcctgggcgacagagcgaggctctgtctcaaaaaaaaaaaaaaaaccgtcacctcctttagtaactgatgttagtattttggcacattctctttctgtgacttatacacacttaccttgtaagtgttgtactcatttcctatgacagtaaatagtctttgtaacaggctgcatgatatttcataaaatgaatggatgtggcataatttatatatgtgccttttgaattatgctattataattaatactgcaatgaacaattcttatattgcctctatgcctcaaatgtctcatcatttcttcttttttctgaggatgtcagattactgggttaaagggtatgaatatttttaagaccttggtacagatttctaaattgctttccagaataattcccatgtgatactttcatcatgtttatttcagactttctttttccttttttgagacgaaatctcactctgtcacccaggctggcgtgtagtggcacaatctcagctcactgcaacctccgccctctgagtttaagcgattcttctccttcagcctcccaagtagctgggatcacagacaagtgccaccatgcccggctaattttcgtgttttttgtagagatggggtttcaccatgttacccaggctggtttcgaactcctgagctcaggcaatctgcccacctcggcctcccaaagttctgggattacaggcgtgtgccaccacacccggccatcagacttttttttatgccattttttgccatataatggtctaaagacatacatcatatagaaactataatacaaaatttataggtatatctaagaaaatgaaagtatatttaaagcataaaaataaacccctcttttacttaaaatttttaaaaaattggattaaaaatatgaaacttccaacaaattgaacttttttttttttcttttttgagacagggtcttgcttttgtcacccagactggagtgcagtggcgtgatcttggctcactgcaacctccacctccctggttcaagcaattcccctgcctcagcctcccaagtagctgggattacaggcgcatgtcaccacgcccagctaattttttttgtatttttagtagagacagggtttcaccatgttggccagactgggctcgaactcctgacctcaggcaatttgcctgcctgggcctcccagcgcgctgggattacaggcatgagccactgcacccagcctgaacgttttatagtagtaaagataattcagtaatgcccaataatgactaagtaagttataacaagaacaatgtcagcaataactagtgctttttagtaaacagggtcaggcaaccttgtaccctttaaaaatgttcaaatcttgatataactccttcctaattggagcaggattgattgaggaggaaagtgtgcagtgatggttaccagcttcagcctcttggcttgactttgcaaatactgtggagaatttggaaagagcttgagaatatcttacatagtcacatgttgctgagaagagttaagaactaacttcttgatgttcatttttaatagtggtttgcattcaaaaccttatagagctcattagtaggagagctgagaagctaatatttgcttttcactaaaattcctgattacttagcctaggtagttccttgtctctctaggttctgtctttgggagcttggctctaaggttatcaagctaactctttcttacctcttacccttcccaaattgaccctggttctgatttgttattcgtatgattttctagtttttcttttccctttttgagtatttgaagcttcatactgaatatagtaatcatagtattcatgcataaagaaaatcataaagtaattgcataaatccataaagtaatcatagttttcatgcattaaaaaaactagtttaggccgggcgctgtggctcacacttgtaatcccagcacttttggaggccgagacaggcgaataatctgaggtcaggagttcgagaccagcctggccaatatggcaaaacctcttctctactaaaaatacaaaaaattagccgtgtggtggtgggcactgtaatcccagctattcagcaggctgaggcaggagaatcacttgaacctgggaggcagaggttgcagtgagctgaggtaatgccgttgcactacagcctaggcgacaagagtgagactcttatctcaaaacaacaacaacaacaaaaactagtttctctctagtgtaaaaaatactgttaagccgggagtggtggctcacgcctgtaatcccagcactttgggaaggcgaggcgggcagatcacaaggtcaggagatcgagaccattctggctaacacagtgaaaccccgtctctattaaaaatacaaaaaattagccaggcgtggtgacaggcgcctgtagtcccagctactcaggagactgaagtaggagaatggcgtgaacccaggaggcagagcttgcagtgagccgagattgtgccactgcactccagcctgggctacagagcgagactccatctcaaaatatatatatatatagactgttaaaaagtctccctattacagattcataatttatgagtcattaaataatatttttaagccatgacattttttccagcaggagtctctaaatctgttttaccactgtaaaaccccaagcaaaactctactacatcagctgtgtcactgtaaaacctgccttaactcacatcagtatgaaattaagcaatgtgtgtgaaactattttataaactgtaaaggattccatacatgcatgttggcaattattaatgtcttctctaggtgtggctttgaaacagatgcagattctttctgctacaaaaaacatagttacaaatgttttgtaacaaggagagacacaaatatcttcatggacatggattgctatgagtttttgattgactaatacttgagccaccacttcagtgatggtataatttatcaaacagtattgagaaacagaaactactggggatgttttaaggagaaaaagtacttaatagagaaattagggttttacataatcttaagaaaagatgaaggtgcagatcttagccaggcctccagagtaccacaaaccaacttgcaggaagagctgtaaccactgccccaattggcacaatgggtaatgaggatattaaatttaagaacacactgctatagcaatgatcctgggcttagaaagctgccaccacaattgcctagacatgggaagtctggcccccactgcaaaagcagtgaagcagaattttgggactggcatctccatgactttgcttgccaccagagaacaaccaaagtagggagatggctggccttatttctgcctatttattttattttattttttgagacagactcttgtctgtcacccaggctggagtgcagttgtgtgatcttggctcactgcaacctccacctcccagcttcaaacaattctcctgcctcagccttctgagtagctgagattataggcacccgccactgtacccagctaattttcttatttttagtagaggtgggtttttgccatgttgaccaggctggtctcgaactcctgacttcaggtgatgcacctgcctcagcttcccaaagtgttgggattataggcgtgagccaccatgcctggcccatttgtgcctttttttttttttttttttttttttgagatggagtcttactctgttgcccagaccagagtgcaatggtggcatcttggctcattgcaacctctgacttccagtttcaagcaattctcctgcttcagcctcccgagtagctgggactacagctgtgcagcaccatgcctgcctaacttttgtttctgttttgtttttttgagatagagtcttgctctgtcacccaggctggagtgtagtggtatgatctgggcttactacaacctccgcctcccgggttcaagcaattctcctgcctcagcctcctaagtagctgggactacaggcacgcaccaacacacccagctaatttttttgtatttttaacagagatggggtttcaccatgttggccaggctggtctcgaactcctgacctcgtgatctgcccgcctcagccttccaaagtgctgggattacaggcatgagccaccatgcccagacaatttttgtatttttagtagagacagttttgccatgttggccaggctggtcttgaactcctgacctcgggtgatccacctgccttggcctccggaagtgctaggattacaggcgcaagccaccgtgctcaacccattttggccttttaaagctcatgtgagcacttaatttgtaaccagaatcctacttgtaaaataatctaagacatgtagcttttagctttgtagcctctataatattaatggcacagtgggagtggatgctgagtgccacttaaacatgttccatctcagtgtcttcacagctggaaggtgtcaacattgtttcaaggtgggcaattgatttacttctcacttttcataaactaaaagtagaataaaggctattcctctaaaattgctatcttacctgtcactcccttgcattctcacctaccttcttgagtggaggggaagagggcatggagtgatagctgatgtgccaggaattctccatactcagtccgtctttcttgtgccatgtcgcagcatcaggatttgctaatgggagggtactgcccttatgtgcatcattagccatgcacactaaagtcttacacctacacacaggtcagtattcgggcttagagaccaacagggaaaaattgcagttctcattggttgaactttattgttcacagttttaaaacacaaaattgagaggaactctagaaaaaatgtgtcattctattaataattgttgctggtagtttaaaaattctggttccttttcaaattcctatataccccccccccctttttttttttaataccttgatcttagccaaaacaccgagaagcaatcttttttttttttttttttttaacctatggcttctcactgagattgtcagctgttggtaagttttggtttttggttttctgtgtttgtatttacatgtatgaaatctagattgagtatcccttatccacaatgcttgagactagaagtgttttagatttggggttttataggatttgtgaatatttgcactatacttgccagttaagcattccaaatccaaaatctcaaatctgaagtgctgcactgagcacctcctttgagtatcatgttgatgctcaaaaagtttctgattttggagcatttcgatttcagattttcggatttgggatgcctgacctgtaatttcagatttacataaaagcagaaatagtacacagagcgccttatatccttcacccagattccccaattgttggcctttctgaaccatttgggaataatacgcagatatgattttccattatgtctcagttgttcagtgtgtattttctgagtacaagaatatattcctacatatttacatcataactatcatgtttaaacattttaaaagtggggatttgaattacattgtttttccttttgaaaaaattacagaggagctgaatgcaatcaatattacttaaaatctgataatgtgtgttaaatagtagttttcatttatcaagtgttcagtaaatgcttactatgttgtaacagcacggttatcagcactgttgaaatagatgaacaagttaacatttgcactctcattagcttacacgccataaagagggaaataaggagaacaccagatggtaagtttatgctgagaattaaaacgaagtgatgaaataatgagaatgtcagatggctacttttggtgggatggtcaggaaaggcatctctggggagattgttaagctcagacctgaatcaaaagaatgagccagccatggaaacattatgttaactcacatggtagtttgagatgctttatctgatcaaaggtacttattttcagtgactttcaacaatattaagggtctataaaccaacactcatttgcataagaatagctaccagtgaatctttttgtatgataggtttgtttgtttgtgtgtttgtttgttttttgagacagagtcttgctctgtcacccaggctggagtgcagtggcgcaatcttggctcactgcaatctctaccttcccagttcaagtgattctcctgcctcagcctcccaaagtagctgggattacaggtgcctgccaccacacctggctaatttttgtatttttagtagagatggggtttcactgtgttggccaggctggtgtcaaactcctgacctcaggccatccacctgcctcggcctcccaaagtgctgggattacaggtgtgagccaccatgcctggccatgataggttattttgtgatgaaaatacctacctcttaatttgtctgataaatttaaattttatgtctaggtttcctaggatcaacacttctatattttaaagtaatctatatcagactaactgctcttgcattcttttaatgtcagtgactactttgatttgtggaacagtgtattttccacatgaatagtttttctcatggtgtatttattcttttaagttttgttttttaaatatacattcacttttgaatgtttcagacagcagcaacagcagaagcagcagcagcagcagcagcagggggacctatcaggacagagttcacatccatgtgaaaggccaaccaccagttcaggagcacttgggagtgatctaggtaaggcctgcttcatcatgttcgctaccttcacacttttatctgacatatgggctccctctgatttttgctttacattattcttcatcccctctttaatcatattaagactcttaagtaaatttttaatctactaaatttccctggattaaggagcagttaccaaaaaaaaaaaaaaaaaaagctagacgtggtggctcacacctgtaatcccagcactttgggaaaccaaggcaggagaggattgctagaacatttaatgactactttaacataataatttaaacttcacagtaatttgtacagtctccaaaaattccttagaaatcatgatttattttttattttttgagacggagtctcgctctgtcacccaggctggagtgcagtggcgcaatctcagctcactgcaagctctgcttcccaggttcacgccattctcctgcctcagcctcccaagtagctgggactacaggtgcctgccacttcaactggctaattttttgtatttttagtagagacagggtttcactgtgttagccatgattgtctcaatctcctgacctcatgatcttggcctcacaaagtgctgggattacaggtgtgagccactgtgcccagccagaaatcatgaatattagtaggtgaaaaataaatacattttaccacccagaaaatgaaaaatacttgagtataatctaaataacaatgggaagtgcagagttactttccaggtctcggtttaaatatgtcttaaagtttggccaattagtagtagaagttgagagaaaaagtaactgtatctgacaaagaaattataagcagaatatataaagaactcttaaaactgaacaataagagagcaactcaataaaaaggtgaagaatttgaaaaggtacttcaccaaataagacatagggatgacaagcccatgaaaagactctcagcatcactagtcacagggagatgcacaataaaaccacaatgagataccacggcacccctgtaggtgtggcttaatgaggaaataaaactgacaataccaagtgttgacaaggatccaggcagctgagactcatacactgttaatgggaatgtaaaagtgtacagctttgggaaacagtttggcatttttttgataaatgtatacttagccatatgatccagccatcctaatcatgtatatataaccaagagaaaagaaaacttaggttcacataaaaacttgtatcaaatgcttatagctggccaggcatggtggcccatgcctattatcccagcactttgggaggccgaagttggtggatcacctgaggtgaagagttcaagaccagcctggccaacatggcaaaaccccgtcttctacttcaaatacaaaaattagccaggcatgatggcgggcacctgtagtcccagctcttcaggaggctgaggcaggagaatcacatgaacccgggaggcggaagtttcagtgagccgagatcgtgccactatactccagcctgggtgacagagcaagactgtctcaaaaaaagagggctggacacagtgacttacgcctgttatccccgcactttgggaggccgaggctggtggatcacctgaggtcaggagttcaagaccagcatggtcttggtcaacatggtgaaaccccatctctgctaaaaatacaaaaattttctgggtgtgatagtgggcacatgtaatcccaggaggctgaggcaggagaatcacttgaacccgggaggcagaggttgcagtgagccaagattgtaccactgcacttcagcctgggcgacaagaccgaaactccatctcaaaaaaaacaaaaaaggattatagcatctttattcataattgcccaaaattataaactgcctaaatgtagaccttcatttagttaacgaatacacaaactgtggtatatccaaacaattgaataataaaagggatgaactggtacttttttctattcctcctcttaagtacagccaaaacacctcaacatttgtataaaacataagctgggccaggcgcggtggctcacacgtgtaatcccagcactttgggaggctgaggtgggcagatcacctgaggtcgggagttcaagaccagcctgaccaatgtgcagaaaccctgtctctactaaaaatacaaaattagttgggcatggtggcgcatgcctgtaatcccagctacttgggaggctgaggcaggagaattgctcgatcccgggaagcagaggtcgcgctgagctgagatcgcaccattgcactctagcctgggcaacaagagcaaaactgcgtctcaaaaagaaaaaaacatgagctgaatctcaaaggcagggagaagacagaccttggaaccagaggagcagcgtggtggggagtggcctggattttctttttgcctcatttatcctgggcttggtgctggagaagctgtgggctcagaccaagagaaaaccccataaaaagcctgctctctttagccaaaagaggcagcctagcaagacaaaaacttttagataataagcacttgactatagtcaaacaccacagaataaactggccccaaaccctgtcagcaaaggccgagtggaagtcaagatatgtaccgcaacctggaagtcataaggtacacttctcccctttcccagccaacatggtgtcagagaaggctgcctggggagctggggttttccttccctccaggaggtgataacactcctttgccacggtgtcagtggtcacagggagcctgaacgtccacctaataatacataggcatctctctggctcctatgggggtaatgtcagagaagaggcctagtagagaatccagactgttgctggcatccagcagtaacaaggacacctccacaatgtccgtggaggccacgtggggatcagtaacaaggcattcctctccctcccagtcagatgtcagtggaagactaggggactagaactcccgtgtgcattcagcagtaatgcccatgaccaccactccgtgttatcacaggccttgaagaagcctgaactttcactcccctctggttgtagtgaggtggcactccctttttcctgctgccagtgctgtgtcagaggaggcttgccaaattggaagatgtaaataagattcacattctcataacgtaataccccaaattttcaagattcaattgaaaatcactaagccgggcacggtggctcacacctataatcccagcactttgggaggccgaggtgggctgaacacttaaggtcaggagttcaagaccagattggccaacatggtgaaaccccatctctactaaaaatacaaaaattagccaggcatggtggcgcatgcctgtaatctcagttactggggaggcggaggcaggagaatcactgaaacctgggagacagaggctgcagtgagccaagattgcgccactgtactccagcctgggcaatagagcaagactccatctaaatttatgtcatggagtcccagaaggagaggagaaagagggtggggctgaaaaaatattggaggaagaagtcatggctgaaaaattcccaaatttggcaaaagtcagaaacctatggattgaaaaagctgaatgaagttcaaatatgataaactcaaagaaattcacagagacatatcatagtcagatttctgaacactgcagacaaaaaatgaagatcttgaaattagcaagaaacgaccttacctacagcaatttgaatgacagcagatttcccatcagagatcataaaggccagaaggaagggatacatacaacaatttttctagtgctgaaagaaaatatctctaggctgggcacggtggttcacacctgtaatcccagcacttttggaggctgaagtgagaggatcacctgaagtcaggagttcgagaccagcctggccaacatggggaaaccctgtctctactaaaaatacaaaatttagctgggtgtggtggcacatgcctgtaatcctagctacttgggaggccgaggcaggggaattgcttgaacctgggaggcgaaggttgcagtgagccaaggttgggccactgcactccagcctgggcagttgagtgagactccgtctcaaaaaaaaaaaaaaaaaaaaaaaaatttagccgggcttgttggtgggcacctgtagtcccagcactcaggaggctgaggcaggagaattgcttgaactcgggaagtggaggttgcagtgagccaagcttgtgccactgtactccagcctgagtgacagagcgagacctcgtctaaaaaaacaaaaacaagaaaacaactctaaacccagagttacacatccagagaaatatccttcaggagtgaagggaaaattaacaatttttcttcagcagacctaccctaaaagaatggctaaaggaatttctctaaaccaaaaagaaatgataaaagaagtaattttggaacatcaggaaggaagaaagaacaataaaaagagtaaaatatgggtaaacagatagactttaccctccttttgaattttctaaattgatggttgaagcaagaattatagcactgatttgtttttcagtatatatactggaaatatttaaggcaattatgttacaaatgaaggagggtcaaagtatataaagggaggtaacctttctatatttcttttgaattgatgcaggcactttggaaagtaatttcactatttgtttaaaaacgtaacataccctgaccatatgacatagcatctatactcctgggcatttgtcccagaaaaacagaaatttatttatttaatttaaaattttttttttcagtattacactccgtaagtgctgtaattagcacttagagaggccaaggcaggcagattgcttgagcccaggagttcaagaccagcctgggcaatgctgcacaatcaaaaaagaaaaacagacatttagaaaactattttaaatgtctttaattgctgaatgcctctttggctaatatttgtaagatccttctcctcctcctcctcctcctcctcctcctcctccctccctccctcctcctccctccctccttcttcttccttcttctggcagagtctcactctgtcacccaggctggagtgcagtggcgtgatctcggcttactgcaacctctgcctcctgagttcaagcgaatctcctgcctcagcctcccaagtagctgggactacaggcgtgtgccaccatgactggctaattttttgtattttcagtagagatggggtttcaccatgttggtcaggcaggtctcgaactcctgacctcgtgatccacccgcctcagtttcccaaagtcctgggattacaggtgtgagccactgcgcccagcctggaagatcattatttagacctacaactgatgcattgttccactgacacaattgcccaggctggtcttgaactcctgggctcaagcagtctgcctgccttggcctccctaagtgctagtattacaggcttgagccactgtgcccagccaaaaatagaaatttatattctcacaaaaacatgtacatgaatgtttatagcagctttacttgtaataatcaaaaactggaaatgaccaaaatgtcctacagtgaaacaaactgtagtacatccatagcatgtaatactctactgtcaggattaaaaagaaaccaactgttggcacaggcagcaccgtggctggatctcaggggcattatgctgagtgcaaaaaagcctcaaagggtcttatactgtatgattccatttgttcaacgttctaaaaatgacagctgtatagagatagagaacatattagtggttgccgctagttagagaaagtgggtgaaggagaggtgggtgtgaatataaattgataggagggagatctttgtggtattataacacttctatgtcttgattgtagtgctcatggttacatgaatacacatgtgtgataaaatgccatgtagaactacatataacattgtgccaatgtcactatctaggttttagtttgatctttagttacgtaagatgtaactgttgggtgaaattgggcaaaagaatacccgaaacctctctgaaatatctttgcaacttcctttgaattgacaattatttcaaaatagaaagttgggtttttgttgtgtatatcaacatgagtatatcaacatgaattgttgatatacacaacatgagtatatcacaacatgagtatatcaacatgaactgctgatattgttgatatacacaacaaattggtgatatacacaacaaatcccaaatgcattacactaagtgaaagaagccatattcaaaaggctacatatctactgatgccttttatatgacatgcaggaaaagatgaaactgttggacagagaatatactgttggctagctgggattaggaattggggattgaccacaaaggggcagcatgagggagttttctggggcaatggaatggttgtatatcttgacagtgtatttgtcaaaatatatagaactataaaagtaagttttgctttatatgcattaaatcaaaaaaagaaactcgtgctcaaatagaaatacattttctgagagcttaccttttgatgactttgagaattttctggaaattttaaagaaatgtggttttgtttcccaacaggtgatgctatgggtgaagaagacatgcttcaggcagctgtgaccatgtctttagaaactgtcagaaatgatttgaaaacagaaggaaaaaaataatacctttaaaaaataattgagatattcatactttccaacattattctgtgtgattacagcatagggtccactttggtaatgtgtcaaagagatgaggaaataagacttttagtggtttgcaaacaaaatgatgggcaagtggaacaatgcgtcagttgtaggactaaataatgatcttccaaatattagccaaagaggcattcagcaattaaagacatataaaatagttttctaaatgtttctttttcttttttgagtgtgcaatatctaacatgtctaaaattaggggcatttttcttggatctttttgcagaccagctaattagctcttgcctcaggctttttccagttttctttttctctcttgtagataatttggctcacatcatctaatagtgactttcatttcttattaaccaaattaacctttcaggaaagtatctctagtctgtgttgataatagtaatggttctagaaggataaacagtcctcccttcaactgtatactgtgtgctccagtgttttcttgtgttattttctctgatcacaacttttctgcgacctggttttcattattttcccacaattcttttgaaagatggtaatcttttctgaggtctagcattttaagtcctgtgatgggatcattatttcatgactggtgcattcctaaactctgaaatcagccctgcgcaagtacttgagaataaatgagcgttttttaaaatgtgtgagcatgtgctttcccagatgctttcccagatgctttatgaatatcttttcacttacatcaaaaccttacagctttgttgcaaccccttcttcctgcgccttattttttccttctccaattgagaaaactaggagaagcatagtatgcaggcaagtctccttctgttagaagactaaacatacgtacccaccatgaatgtataatacatgaaatttggccttcaattttaatagcagttttattttatttttttctcctatgactggagctttctgttctctttacagttgagtcatggaatataggtgtctacttcacatcttttagtaggtatagcttgtcaaagatggtgatctggaacatgaaaataattaatgaaaatgtttaaatttatactgtgatttggcacttgcatcatgtttagatagcttaagaactgtagaagtcatagtacttagtgggtctgtaaataagaaagtccatagttttgataaatattctctttaactgagatgtatagagagtttcttgctgggtcaataggatagtaccattttggtgaaaaccgtgtctctctgaatttgatgttttagtttctgtgttccccatccctcattctccagccccttttgaagctcttttgaatgttgaattgttcataagctaaaatccaagaaatttcagctgacaacttagaaaattaaagtatggtatattgccctactggtgtgtggctgcacacatttcatcagggaaagttttttgatctaggatttattgctaactgaaaagagaagaaaaaatatcttttatttatgattatgaaatagctttttcttggatataacagattttttaagtcattattttgtgccaaagttttctgaagtttcccttacacaaaaggatagttttattttaaaatctaaagttttcttttaataattaaaaatgtttcagaagaattataaaactttaaaactataagagatgttagagtttagtactactccctcaagatttaaaaagctaaatattttaagactgaacatttatgttattacaggtgtgttagtcatattttccatggatatttgttcattacctttttccactgaaaagttacgttaaacttttcatacacttgaattgatgagctacctaatataaaaatgagaaaaccaatatgcattttaaaattttaattttagcgtttataaagttcatatataccctagttaaagcacttaagaaaatacggcatgtttgacttttatttgctagagaggtttttttggttgtttttgtttttgctttttttgagacggagtctcgctctgttgcccaggctggagtgcagtggcgtgatctcggctcattacaacttccacctcctgggttcaagcgattcttctgcctcagcctccagagtagctgggattacaggcgcccaccaccatacccagctgatttttgtatttttggtagagacatggtttcatcatgtttggccaggctggtctcgaactccagacctcaggtggtctgcctgccttggcctcccaaaatgttgggattacaggcatgagccaccgcgcctggccagctggagagtttttaaagcagaggtgagcacacactggatgcgtttgaatgtgtttgtgtagtttgttgtgaaattgttacatttagcaggcagatccagaatcactagtgaactgccatcttggtggggttggcttaaatgtaattgaatgtttagattctatttcttaattgattggccagtatgaaaatatgccagtgcaagtaaccatagtatcacaaaagttaaaagttatgcaaagctatagcttatatatcaggtactgccatttactgtaaaccacctgcaagaaagtcaggaacaactaaattcacaagaactgtcctgctaagaactgtattaaagatttccattctgttttactaattgggaacatcttaatgtttaatatttaaactattggtatcatttttctaatgtataatttgtattactgggatcaagtatgtacagtggtgatgctagtagaagtttaaataagccttggaaataccactttcatattttcagatgtcatggatttaatgagtaatttatgttttaaaaattcagaatagttaatctctgatctaaaaccatcaatatatgttttttacaataatcaacatataaatatttcagtaatataaactgtttgaaaaggctgctgcaggtaaactctatactaagatcttggccaaataatttacaattcacagaatattttgtttaaggaggtgctttgtttttgtccttaaaacttgatttttcttaaggctttattcatgatgccaaagccaatgaggaaaaaaactcaaaaccagttgagtatcattatagacaaaactaccagtagtccatattgtttcatttaatattaagttgaataaattttattccagtcagagcctaaatcacattttgaatgtctgaatttttgatactatttttgaaatcatgctagtgccggccgggcgtggtagctcacacctgtaatcccagcattttgagaggccaaggtgggtggatcacaaggtcaggagttcaagaccagcctggccaagatggtgaaaccccgtctgtagtaaaaactacaaaaattagctgggcgcggtggcaaggtgcctgtaatcccagctacttgggaggctgaggcaggagaatcacttgaacctgggtggcagaggttacagtgagccgagatggtgccattgcgctccagcctgggcgacagagtgagactccatctcaaaaaaaaaaaaaaaatcatgctagtgccaagagctacgaaattcttaaaactcttaaaactggcccattggacttgtacaaatacaaaatagattcaatgcataatcaaaatattttaaaatcttaagtagaaaaataaatcttgatgttttaaatttttaggaggattcgataattaatattgatgacctccaggctgggcacagtggctcacgcctataatcccagcaattcaggaggctgaggcgggcagatcacttcagggcaggagttcaagaccagtctgggcaacatggtgaaacttcgtctctactaaaactacaaaaattagctgggcgtggtggcacacacctgtaatcccagctactcaggagactaagaatcgcttgaacctgggaggcagaggttgcagagagccgagggctcaccactgcattccagcctggcgcaatagagtgagactctgtctccgaaaaaaaaatatatatgtatatgtgtatatatatatgtgtgtgtgtgtgtctctactaaaaatataaaaattagctgggtgtggtggcgggcacctgtaatcccagctacttgggaggctgaggcaggagaattgtttgaacccaggaagcggaggttgccgtgagctgagattgtgccattgcactccagcctgggcaatgagtgaaactcttgtcttaaaggtttttttttttccttgggctactattttctctttctttctttcttttctttcttcctttctttcctttcttttcctttgtttgtttgtttgtttttagtagagacggggtttcaccatgttagtcaggctggtctcaaactcctgacctcaggtgatccgcctgcctcagcctcccaaagtgctgggattacaggtgcaggccaccatgcctggccttgggctactgttttcaaagtgaattgtttgttgtatcgagtccttaacaagtatagacatatgatatatgtgatcctaattaagaaataccagattggatcaactaatcatgtcagcaatgtaaataactttttatttttcatattcaaaataaaaactttcttttattcctggtccctttataaccagcattttttgctttgaaaaatgagctggctttgtagttttttaaagttttaaacataagaaaaatgtcttttgttctatttgctttcatgaatgaagatcattgacatggttggtaaattctagaattttgattttgttttttaatttgaagaaaacctttgctatttttattttttccaaatggtctgacattttaagaatgaatgctaataacttaacttctaaatttatcgtcattggcatgtttaatagcatatcaaaaaacattttaagctggtggatgcatagacaaagcaatgggaaactagtgaaatacacacggatgttcctgaggcacttaggaagctctcagttgtctcttacatagttcaaggaatgttttctgaatttttttaatgcttttttttttttgaaagacaaaaacatacattttaaatgtgattatctaatttttacaacactgggctattaggaataactttttaaaaattactgttctgtataaataaaatatttgaaattcaagtgcagaaaatatctgaaacaaaaagcattgttgtttggccatgatacaagtgcactgtggcagtgccccttgctcaggacccagccctgcagcccctctgtgtgtgctccctcgtaagttcatttgctgttattacacacacaggccttcctgtctggtccttagaaaagacgggcttccaaagcactgttgaacactgaggattctgttgttagtgtggatgttcaatgagttgtattttaaatatcaaagattattaaataaagataatgtctgcttttctatttccttttgaatttgtgtttattgttaattcatagctattcaaagtatgattagagctgagctttgtggcttgcatctgtaattccagctacccaggaggcagaagcaggaggattgcttgagcccaggagtttgagcctgcagtgagctatgatcttgccactgtaattctagcctggtcgacaaagcaggaaaaaagtgtggatggaggaccagcaacatctgtatcacctgtgagtttttcagaaatgcagagtttcaggccacactcagacctactgaatcagaacttgcactttttgcaagatccccaggacactgaagtgtagagtgaagcttgagaagcacggttttatggattgttcttaaccagctgtggtggtgaatatgagtaacgcaggccagcacagtccattgatattctattccagcttactgcctgccaaaaggtccattattactggatcccgagtcttttccaagagaagctaagaattccaaatttttatttgaaatatatttttaaaatggttgctcaattggcagggtgccagtggctcatgcctttaatcccagcactttgagaggccgaggtggaaggatcacttgagcccaggagttcgagaccagcctgggcaacataaagagaccccatgtctattaaaaaaaaaatagagacagaatgctgccttaaaaaaatcataaatgtttgctcaattgatttttaaccctgagggccaaacaaagcacattagtagcaatttttaagagtgctgtttttcctcattgtatctaactctggacaccagaatccaaatgtaatgattggactccacctagactgattgaggaatatattgtcttcacatttagggttgtctattcattttagctttaattaggattgggcacaaattttgaaacataatatgttacaggacagggatcccgatccagaccccaagagggttcttggatcttgtgcaagaatgaattcagggcaagtccataaattgaaagaattgaaagccagttcattaagaaagtagaggaataaaagaatggctaccccataggcagagcagccctgagggctgctggttgcccaccccgcccccccccctttttttttttttgagataatctcgctgtgttgccaggctgtagtgcattggcatgatctcagctcactgcaacctctgcctcctgggttcaagcaattctcctgcctcagcctcctgagtagctgggactacaggtgtgtgccaccatgcccagctaatttttgtatttttagtagagacagggtttcaccatgttggccaggaaggtctccatctctttaccttgtgatgcacctgccttggcctcaaaaagtgctgggatgagcaacctcgcctggctggttatttcttgaggatatgctaaacaaggggtggattattcatgcctcccctttttagaccatttagggtaacttcccagcattgctatggcatttgtcaactatcatggtgcttacgggagtgcagcagtgaggaggaccagaggtcatttcatcgccatcttggctttttcagctggcttctttactgcaacctgttttactagcaagtttttttatgacctgtatcttgtgcagaccttctatttcatcctgtgacttagaatgccttaaccatctgggaatgcagcccagtaggtctcaggctcattttacccagcccttattcaagatggagttgctctggttcaaacgcctctgatatttccctactcccttttataagacaacccttaatcctaagggttgcagagggatgaagatccatcttctgtaacttcttcaggctgaataagggtgatgatattcctgcctatgagagtctcttgtattagggtagaaaggagctcagtcagtatggctctctatccttcctcccttccccagcccctgacaactaccattctactttgtctctgtaattctaagtatctcatataagtggaatcattcagtatttgtagggttttttttgtgactagtgtatttcactttgcatgtcaaggttcatccatgttgtagcatatgtccgaattttcttctttttaaaagctgaataatattccattgaatgatatatgcacattttgcttattcatttatccatcaaagaaaaccaatagcttttttacataccagtaacctggttaaaaaaaataagatggaaaaataccaagcccaaaaatgtcaaattgttgaacaccagagaggtactataattcaagctgagcagaaaggaatggcccttgtctcagccctgagccacatgtcactacatgggccccaagcagctcttcttgtgctcagagtcctgctaagtcttgttctgcactcctctaaagtggctcaaactagcacaggaggccaggagggagcagattctatgccacctccattgcttctgcgccttctccagatccattttttccaaaagctgtgtttgaattctgcacaggggcaggggcatctctgtctccaacactgaaaccccttttaccagacccagagaagactgcctttttttttttttttttttttttttagacggggcctcgttctgtcgcctaagctggagtgcagtggcaccatctcggctcacggcaaactctgcctcctgggctcaagcaattctcctgcctcagccacctgaatagctgggattacaggtgcgggccaccacctccagctaattttgtatttttagaggtggggttttgccatgttacccaggctggtttagaacttctgagctcaggtgatccacccgccttggcctcccaaagtgctgggattacaggcatgagccacctaacccggccagatttaactgctttgaaccaccatctcacacatcttccaggggcttctagttaaatacagagtattaatagtgtataattccatttatgtaagatccttggaatagccaaactcacagagacaaaaagtagaatggtggttgccgggggatggtagaggggaaaattgggagtcatttaacgagtatggagtttcagtttaggaagatgaaaaaagttctggagatggatagttgtgatggctgcacaacaatatgaatgtacttaatgtcggtgaaccgtataaccatttaacaattgaaaatggttataaaggtcaattttgtgttatgcatatcttatcacataaaaaatacagaggactgatcattatatttgctcccttccaaaatcccacctaggttaaagaaaaatatataaacccacaagaacacagggaccaggagaggagatgcattcattggattaggtttggttgtaaaacaaaaacaaaaacaacaaaaacaaaaaaaaacacctgggcgcgatggctcacaccttgtaatcccagcactttgggaggctgaggcaggcagatcacaaggtcaggagttcgagaccagcctgaccaacatagtaaaacctcatctctactaagaatataaaaaccagccaggtgtggtggcatatgcctgtaatcccagctactgaagttggctgagacaggagaatcacttgaaccagggaggcagaggttgcagtgagctgagatcgtgtcactgcactccagactagatgacagagcaagactccgtctcaaatggaaacaaaaactaatataacagtgactttacatgctatgggttttttttctcctctcatcttcaagaaatgcggagacggccagtccagggatgatacagcatcacagtgtcaggaatctgctctttctgtataattgttacaggaaaggggtcccgatccagaccccaagagagggttcttgaattcaggccaagtccacagtgcaaagtaaaagcaagtttattaagaaaggaataaaaattccctactccatagacagagctgcccggagggctgctggttgcccatttttatggttatttcttgatgatatgctaaacaaggggtggattatttatgcctcccctttttagaccatatagggtaacttcctgatattgccgtggcattcgcaaactgtcatggtgctggtgggagcgtagcactgaggaggaccagaagtcactcttgtgtggcctttttggtttggtgggttttggccagctcctttactgtaacctgttttaacagcaaggactttatgacctgtattttatgttgaccttgtatctcatcctgtgacttagaatgccttaaccatctgggaatacagcccagtaggtttcaacctcattttacccagctcctattcaagatggagttgcggcccggcgcggtggttcatgcctgtaatcccagaactttgggaggttgaggtgggtggatcacgaggtcaagagttcaagaccagcctggtcaacatggcaaaaccccgtctctaccaaaaatacaaaaattagccgggcgtggttggcgtgtgcctgttatgccagctacttgggaggctgatgcaggagaatcacttgaacccaggaggcagtggaggttgcagtgagcagagatcgcgccatgcactccagcctggacgacagagcaagactgcgtcttggggaggaaaaagaagaaaagatggagttgctctggtttacattcctctgacataatggctttatgtacatggcttccatggttaaggtcagctcgtggatctgatatggctgtgttggtgatcatgcccagcaatcagaaagagaagggaggccgggtttggtggctcatatctgtcatcccagcacttcgggaggccaaggcaggaggatcacatgagcccatgagtttgagaccagcttgagcaacatagggagacctcatctctacaagatataaaaaaaactgtcggacatggtggcgtgtacctgtggtcccagatattcaggaggttgaggtgagaggatacctggaacctggaggtttgaggctgcagtgagctataatcgcgccactgcactccagcctgagcaacagagtgagaccccatctcaaacaattaaaaaaaaaaaaaggagggcagaaaaagtctatgtaccttttctttcaggttaccttctcaaagttgtgcataccccttccatttacattatattggccagagcttaacatgacaactactagctacaaggtggtttttattctgggttgccatgcatcttagcttgagtaccctacaggcagatcctgagacgaggattcctgtgaaaatgattatttacttatttaattaatttattttgagatggagtctcactctgtcacccaggctggagatcagtggcatgatctcggctcactgcaacctctgcctcccaggttcaagcaattctcctgcctcagtctcccaaatagctgggactacaggcatgtgccaccatgcccggctatttttttttttttttttttgtatttttagtagagacagggtttcactatgttggccaggctgatctcaaactcctgacctcaggtgatctgcccgcctcggcctcccaaagtgctgggattacaggcgtgaaacactgcgcctggccgaaaatgattttttaaaagtgttccaggaagaaacggaaagggcataggggagtaagaaagtggaaaatggaaaggaaggaagccaagcaaggggatcctatcaagcaaagcctcagtcctgcagacagtttggaggcaggatattcacatcttagagttgtccaaaacaggacaggcaagctgcagaattttcaactctggctgaataaggttgcgtttcagctctccgggcacctggaaagtatgggctccagtagcctggaggcagtctgctgacagacacaggtgctggctggtgtgcacaaaagtggtaaagggatgagcgggtgcaatagggacactggcatcttggctgtcatgcatccaggtaaaaagtgggggctcaattactatatatgaaagggagaacagactttaaggaataattatcagtcatttccaggtgagacagcaacagaagagaaatgctaaattttcccttttttgggggggtgcggtggggggacagagtttcgctcttgttgcccaggctggagtgcaatggtgcactctccggctcactgcgacctccacctcctgggttcaagcgattctcctgcctcagcctcctgagcagctgggattacaggcatgcaccaccatacccagctaattttgtatttttagtagagacagagtttctccatgttggtcagagtggtctcaaactcccaacctcaggtgatccgcccgccttggcctcccaaagtgctgggattacaggcatgagccaccgcgcccagcgagagatgctaacatttttttgttttttggaagatgacaagttgatgcaagaatgagcagaaccaggaagctggatactcagtgtttaagagttcctagcaatatgcaggaaaggaaagcaacaagtatcccgggaggtggggttagatgtagactgaaatcaggaggtgtggttaaaactctttgaaagaggctgggtgtggtggctcatgtaattccagcactttgggaggccaaggcaggtgatgacgaggtcaggagttcgagaccagcctgaccaacatgtgaaaccccatctctactaaaaatacaaaaatcagccaggcgtggtggcgcatgcctgtgatcccagctactaaggaggttaagacagaagaattgcttgaacctgggaggggaaggttgcagtgagccaagatcatgccattggactccagcctgggcgacagagagagactccatctcaaaaaagaaagaaagaaaaaagaaacagcagattccctagagaggagacattcatcactaaaaaaaaatatatatatatatatatagagagagagagagagttaaaataattcgcagaactaaaagacctttttgaatgggctcagggtgcccagcataatgtacgaaacaaaagcaaacccacatcaaagtacaccattattaatttcagagcatcagaaataaagagaagatctgataagcttcttggaagaaaacaaggcacagagaataatcagaggagagtagagcaggaaaacagggtcctgggtagagagaactgagtctagccaattgatagaattcttgatgttttgttgaaaacagaagcactttataattctctgggtaagttttagaaagattctgtagtaatggtaaattgtgcaaatttaaaaaatggaacctgttaatttcaggaagaacaaaaggtagaaaaggcaatataatcttggtacaacatttgactcagctgcaatgaataagacttacatagtcatataaggtaagcattgattacttactttaccaataattatgatatcaccatactgaaagcccagaagcaagggaaataaagggaaataccagagtgctaaatctttttttttccgtaagttggtaatgtataaaataataaaatgacaatcataagcctaatgcttagaaattcagaaaaatatcagactaaattttaaagtctactttaaaactgagtttttgctttatagtttcataaataaattcattttgatggttttctcagaacagatgaactggctgagtaaagtggttcatgcctgtaaccctatcactttgggaggccaaggcggatggatcacttgaggtcaggagttccagaccagccaaaaaattagctgggcacagtggtgcacacttgtaatcccagctactcagtaggctaaggcaggagaatcacttgaacctggaaggcgaaggttgcagtgagctgaaattgaacaactgcactccagcccgggcgacagagtgagactccatctcaaaacaaaaaacaaaaaacagatgaattgtttttccttaaggaatactgatgatcccactgcttgagtaatggaaagcagcttgcagctaataagttattttttgtcttttttcctgttctatccattgtcctgggtttgaaatttcagctgggcagctttgatcccaccacctgtagccactgaggttcataggctgtttgagatattatgttcaattgtgctgggtttgttttgctgcttaatgagtgatgaagagcaatgtattcgctactgagatattctgcagaaaaaggaagagatgtcttcagctcaaatgctatcaaacttgtatgtcttttaactttttattataaaaatttcaaacatatgcaaaagcaaaagacttgttcaatgaaccttatgtacccaccacccagcttcaacaattatcagttcctgacaattcttgtttcacctaccccacctctattatacacacatacaaacacacacacagacacacacacacgggagcaaagtcaacttccattattttgaagcacatccaagacatcacatcgcattatttatcacattatttattaagtttcttgggtcatagtctatctcacagaaagaaatcccccatgagaaacttttaggacatagcttttatgttaattacttaatttctgcactagccatccttgccttccttctaattttctgcactagctatccttaccttccttctaatttactaacctgccaaggattctcctgcctcaaagtatttgcatcagctgtttctttctgcctggattgctctttcccagatacttacatgtctcattctttttcacccaggtgaaataaacagccttgttgctcacacaaagcctgtttggtggtctcttcacatggatgtgtgtgacatttggtgccgacaacctgacaggaggactcctctgggagaccggtcccctgtcctcgccctcactccatgaggagatccacttgcgaccttgggtcctcagaccaaccagcccaaggaacagctcatgaatttcaaatcaggtaagcggtcttttccagcctctcttgctacccttcagtctccctgtccttccaattccagttctttttcctctctagtagagacaacagagacacattttatccatggacccaaaactctggcgctggtcacagactcgggaagacagtcttcccttggtgtttaatcactgtggggacacctgcctgatttttcgctcacactccattggtgactgatcatcggggggcacctgccttggtcattcacccacattcccttggtggcaagtcaattgcggggacgcctgctttggctgctcacccacccccttttctgtgtctctacctttctctttaaacttacctccttcactatgggcaaccttccgcccgccattcccccttcttctcccttagcctgtgttctcaagaacttaaaacctcttcaactcacacctgacctaaaacttaaaagtcttattttcttctgcaatactgcttgaccctaatacaaactcgacagtagttccaagtggccagagaatggcacgttcaatttgtctgtcctacaggatctagataatttttgttgaaaaatgggcaaatggtctaaggtgcctgacgtccacacattcttttacacattggtccctccctagtctctgctcccaatgtgactcgttccgaatctttcttctttctctcctgtctcttccttcagtctccaccccaagctctgagtcctttgcgtcctccttttctacagattcatctgacctctcccctcttccccaggctgctcctcgctaggctgacccaggtcccaattcttcctcagtctccactcccccaccctataatccttttatcaccccctcctaacatcccatctggcttacagtttctttccttgactagccctcccccacttgcccaacaatttcctcttaaagaggtggctggagctgaaggcatagccaaggttaatgctcctttttctttatccgacctctcccaaatcagttagcgtttagactctttttcatcaaatataaaaactcaaccctgttcatggcctgtttggcaacaacccttagatgctttaccaccctagacccagaagggccagaaggccgtcttattctcaacatgcattttattacccaacccactcccgacattagaaaaagctccaaaaaattagattctggccctcaatccccacaacatgacttaattaaccttgccttcaaggtgtacaataacagagtagaggcagccaagtagcaacatatttctgagttgcaattccttgcctccactgtgagacaaaccccagccacatctccagcacacaagaccttccaaatgcctgaaccgcagtggtcaggcattcctccaggaccgcctaccccaggatcttgcttcaagtgccagaaatctggccactgggccaaggaatgcccgcagcccaggattcctcctaagccatgtcccatctgtgcaggactccagtggaaatcggactgtccaacctggcagatactcccagagcccctggaactttggcccaaggctctctgactgactctttcccagatcttctcggcttagcagctgaagaccgacactgctcgattgcctcagaagccccctggaccatcacagatgctgagctttgggtaactcttacagtggagggtaagtccatcccctgtttaactgatatgggggctacccactccacattaccttctctttaagggcctgtttcccttgcctccataactgttgtgggtattgacagccaagcttcaaaaccctttaaaactcccccactctggtgccaacttggacaacattcttttatgcactcttttttagttatccccacatgcccagttcccttattaggctgagacattttaacctagttatctgcttccctgattattcctggactacagccacatctcattgccaaccttcttcccaacccaaagcctcctttgcgtcttcctctcttatcccaccttaacccacaatgggacacctccactccctccctggcaactgatcaaacacccattactatcccattaaaacctaatcacccttacccggctcaacgccagtatcccatcccacaacaggctttaaggggattgaagtctgttatcactcgcctgctacagcacgggcttctaaaacctataaactcttcttaaaattctcccattttacctgttcaaaaaccagacaagtcttacaggttaattcaggatctgggccttatcaaccaaattgttttgcctatccaccctgtggtgcccaaccccgtacactcttttgtcctcagtaccttcctccacaactcactattccattcttgatcttaaagatgcttttttcactattcccctacaccccttgtcccagcctctctttgcttttacctgaactgaccctgacacccatcagtctcagcagcttacctgggctgtactgccacaaggcttcagggacagccctcattacttcagccaagctctttctcatgatttactttccactccttcgcttctcaccttattcaatatagtgatgacgttcaactttgtagcccctcctttgaatcttctcaacaaaacaccctcctgctccttcaacatttattctccaagggatataaggtatctccctccaaagctcaaatttcttctccatccgttacctacctcggcataattcttcataaaaacatacatgctgtccctgcctatcatgtccaactgatctctcaaaccccaaccccttctacaaaacaacaactcctttccttcctgggcatggttggatatttttgcctttggaaacctggttgtgccatcctaacaaaaccattatataaactcacagaagcaaacctagctgaccccataaatcctatgtcctttccccacttccctttccattccttaaaaaacagccctaaaagctgctcccacactagttctccctaactcatcccaactcttttttcattacacacagccgaagtgcagggctgtgtggtcggaattcttacacaagagccaggactgtgccttgtagtctttctgtccaaacaacttgaccttactgttttaggctagcccccacattattcctgataccacacctgatccccatgactgtatctctctaatccacctggcattcactccatttccccgtatttccttctttcctgttcctcaccctgatcacacttggtttactgatggcaggcctaattgccattcaccagcaaaggcaggctatgctatagtagtatcttccacatctatccttgaggctaccgctctgcccccctccactgcctctcagcaagccgaactcattgccttaactcaagccctcactcgtgcaaaaggactacctgtcaatataaactgactctaaatatgccttccatatcctgcaccacaatgctgttatatgggcagaaagaggtttcctcactacgcaagggtcctccatcattaatgcctctttaataaaaactcttctcaaggctgctttacttccaaaggaagctggagtcgttcactacaggggccatcaaaaggcatcagatcctattgctctgggcaacgcttatgctgataaggcagctaaagcagcagctagcgttccaacttctgtccctcatggccagtttttctccttctcatcagtcactcccacctactcacagactgaaacttccacctatcaatctcttcccacataacgcaaatggttcttagaccaaggaaaatatctccttccaacctcactggcccattctattctattgtcgtttcataacctcttccatgtacgttaaaagctgctagcccgtctcttagaacctctcatttcctttccaacgtggaaatctatcctcaaggaaatcacttctcagtgttccatctgctgttctactactcctcagggattattcaggccccctgccttccctacacatcaagctcggggatttgcccctgcccaggactggcaaattgactttactcacatgtcccgagtcaggaaactaaaatacctcttggtctgggtagacactttcacttgatgagtagaggcctttcccacagggtctgagaaggccacgtggtcatttcttcccttctgtcagacataattcctcagtttggccttcccacctctatacagtccaataatggaccagcctttactagtcaaatcgcccaagcagtttctcaggctcttggtattcagtggaaacttcataccccttactgtcctcaatcatcaggaaacgtagaacggactaatggtcttttaaagacacacctcaccaagctcagcctccaactttaaaaggactggacagtatttttacctcttgcccttctcagaattagagcctgtcctcaagatgttacagggtacagtcgatttgaacttttaaatggatgcagtttcttgctcggccccaaccttgtcccagacaccagccctctaggtgacaatcttctagtcctcc

SEQ ID NO: 3 - DNA, 39346 bp, mmusculus
ggcggaccggggctgaggggtggggccgggggcggagctgctggagggggctgctccgcgccggggccgttggctccagacaaataaacatggagtccatcttccacgagaaagtgagtgtgggcgttcggtggggagccgtcctcggctcggcggcgggcgtggggagcagcgacgccgcttcaggaactcaggcggggcccgagcgcccccatcccgacctggctgggtgaggggtgcttcctgccttctccccatggctccgctcgtgaagcctcccgcatgcgttcccggcaccctcgccctagaagaccgggcgggtagcctgggcatttcggggggcttcacccggaggattagcgcgggcgttccttgtccacttgccacaccttttcgggtttcttctctcttctctcttagggtctagtctagcgagtcgccttttcagcacctggcggacccttcccaactccacccacgccccctaacctgtcctctggcagatccaactttctctctcaactcagttctataatggaatgctccatgcatttagatcttgattatccatcccacgtctttctgcagttgtgaccgtggctttcccattaaagggcctgacacttcggaagtaaagtaggaaaccccggagggaagtcgtcataagagtttttattacggggatgtttgggttgttctcccatttttccggaccaggaggccagctttgtttttaggtattatggatagattagaatcgttctactgtgtgatttggcttagtctcttcctcaccttaattcctaagtgactacgcttaaaagtattgctgtgacatcttgagaaactggtctatgttcgcatacaattatcaagtcatttgggtgtttctcggacaaccatgtttcataatcattttaggtttggagagggttgctagttgagactattatttcgttgggagcaaaggcctttgtttttatcacttgtaaaggagcattgactcatagtgtttaaaatccacgcacaacaaaaagacaaaaatgatgtgaatctaaggacgttgttaaatgaagtgctcttaagaagacattttgagtgttttggaactggaacaagttagtttgtgacaggatttcttgtagcccaagttggctccagactcccatcgtcctgtctctgcctcctgagagctggctgggatgatggccacgtgctatgactgagtgagctccccctcccggccccctccccacattcatttgtaattaattttccaaaggttttggaataagacccattttaaacatgttatattttgaacactgtatacactgcttcatgagactcttgccattcattctatttaaaaaaaaaagttactgtttgtgtgtatgtgctggtgtggaggtcagggaggactttataaagttctctcttcccaacttggtgtgagttccgggtgtctcaggctcttagcaagcccgtttactcactgagtcatctctagggtgaatgaaaaaagaaatgggaaggacatgacttttcctagggatggcggaggagaaggtttattaaagagatttgggagagcagagccaggggcagacatatttgggagaacccagagtggtcttgaccctgaggggaagggagaaaagggaaggaaatacagcagccaggagccaaagttgcaaaccatacaaaaagagggtgggtaaccaaaatgtatggattacataggcaagagccactaggggaagggcagcatagtccatgctctggagagttcagggtagagggccgggtataccagccataccctgtaacaggagggactaagggatgctgggacaacctggaggccaggtccacttccatatgttaaataggtacctcagccactaagcctgggattaaaacttaacatagggcacttaaacaatgcattaaaaaattatttttggccagcaatggtggtatacctgtttttgatattttatttatttacattttatttatttattttggtttttcgagacagggtttctctgtatacccttggctgtcctggaactcactttgtagatcaggctggcttcggactcagaaatccgcctgcctctgcctcctgagttctgggatcaaaggtgcacgctaccacgcccagctatttacattttaaatgttatcccattttctggttcctctctacaaactcccaatcccatccccccccaccctctgcttctatgagagtacttccccccaccactcccgcctacccgctctggcattcccctacactggggcatcaggccttcacaggaccaagggcctctcctcccattgatgccctacaaggccatcctctgctacagctggagccatgggtcgctccatgtgtactctttggttgatggtttagtccttgggagctctgggtgtgggtgtggggtctggttggttcatattgttgttcttcctatggggctgcagaccccttcagcttcttcagtcctttctctagctcctccactggggactctgtgctcagtccaatggttggctgtgagcatctgcttctgtatttgtcaggcacagagagagttttaagatagccagggctatccagagaaactctgccattaaaatccaaaaaaaaaaaaaaaaaaaaaaaggtgtttgccagggtactgtgtgctcctagtgcccactaaagccagaagatctggaactggaggaactggagttaaagaggccacgtgagcagccacgtgggtgtgaggaattgaacccaggtcctctggaaaagcagccaatactctttgttttgttttgttttttgagacagggtttctctgtatagccctgcctgtcctggaactcactctgtagaccaggctggcctcaaactcagaaatctgcctgcctctgcctcccaagtgctgggattaaaggtgtgcgccaccaccgccgggctagcagcgaggactcttaactgctgagccatctctccatctcccccaataccttcttgacagtactgtttctcattggagcagatttcagtggaggtgactactgaattggtatatgcaaaatgctaggcttacaaagtgcttgtgagtaagcatggaagcccgagttcagatcccagtgtgtgttgtattcaccaatactcgaggcagggaatggacagacaagtgggtttctgggtgctgccccgtcagtcagtccagctgaatggtgagcactagactccactagaaaggtggagagcagctgaggaggacatctgacttagacctttagcacatgtatgaatacatctgcatgtacacatatacacaagaacacatatgcagacatgagtgcacagatacacatctgcttacccagaagtcattcagttatcagcaggtgtatatacttaataaatacttgagaagtacctttgccgtgtgtgtgtgtgtgtgtgtgtgtgtgtgtgtgtgtgtgtatgtgtatgggggtgcacatgtgcatatgcatttagaggcaggaagacaacattggtggtgttcctcacaagtaggttaacttaggacttccaggtatctgcccatttttacctctccagcgctatagttacagatgggtaccgccatgcatggctttttacatgaaggttctggggattaagctcagatcctaaggccagtatggcaagcaccttattgattgactaagctcagatcctaaggctagtatggcaagcaccttattgattgactaagctcagatcctgaggccagtatggcaagcaccttactgattgactaagctcagatcctgaggccagtatggcaagcaccttattgattgactaagctcagatcctaaggccagtatggcaagcaccttattgattgactaagctcagatcctaaggccagtatggcaagcaccttattgattgactaagctcagctcctaaggccagtatggcaagcaccttattgattgactaagctcagatcctaaggccagtatggcaagcaccttattaattgactaagctcagatcctaaggccagtatggcaagcaccttattgattgactaagctcagatcctaaggccagtatggcaagcaccttattgattgattaagctcagctcctaaggccagtatggcaagcaccttattgattgactaagctcagatcctaaggccagtatggcaagcaccttattgattgactaagctcagatcctaaggccagtatggcaagcaccttattgattgactaagctcagctcctaaggccagtatggcaagcaccttattgattgattaagctcagctcctaaggccagtatggcaagcaccttattgattgactaagctcagatcctaaggccagtatggcaagcaccttattgacagaggcatctccccaatcctggagacttcatttgcctttgtcattaatttaactgtatgaagcaagtgaacacttaatgaagtcatagcatatttcttttttcttttttttagatttctttttttaagcatttattactatatataagtacactgtagctgtcttcagacacaccagaggagcatcagatgtcattacggatggttgtgagccaccatgtgggtgctgggatttgaacccaggatctccagaagagcagttggagctcttaactgctgagccatctctccagcccgccatagcatatttcaagagaatgtacctgtgactgtagaagagaccagactgggaatatttaacataattgctattttccagagaattcttttcccttccataacttgcctttaaccagtaaattaactagagaagatatcaaccactttctcatggagttaattttacacttaacccctttgaatgcttccttttaaattagacataaaagcagttgtcagccaggcatgatagcatatgcctttaatcctagtacttgggaggcagaggcaagcaggctccttttgtgatttttttttagattatttggaagagtggaagtgtagtgtgttcatcttctgagcctagcacagtaaaatgtggattccccaactcatagaattttaatagcaaagagagtttctcttgtgtgaaatagaaaagtgttttattatattgtatcgcatatgtatgtaggggttctccatgcatgccactgtgtacatacggaggtcaaaggacgggttgcaggggttggtcctctcctcccactgtgcgggtccttaggtctgcatggtcacagccttttggttcgtgtagaatttttttttcccccgagacagggtttctctgtgtagccctggctgccctggaactcactctgtagaccaggctggccttgaactcagaaatccgcctgcctctgcctcccgagtgctgggattaaaggcgtgcgccatcacacccggcttcgagtagaatttgacagcctgtggctctatgatttttaaattgacttgaacaatttgttgtttccgtccattaatcatatcagaagcagtaccattttacttggtcagggcttcattttaagtgcttatttttcataataaaaaagctacttgttttagagactgaatgtagcacatttggtagagtgcttgccttgcgtgaataaagcttaaattctatccattcccaatacacatgaattgggcataatgagataggtacttttgatttttttaaagatttaattatttttatgtgtatgagtatcttcatgaatcaagtgcaccatgcgcagacagtgactgaggaagccaggagagggtgccagatcctttaggactgcagttactaactagtcatgagcccctctgtagattctggggacagaacccaggtcctttgcaaggatatcaagtgttcttaactccatctctccagcctccaaattccaattattaataacaagaatgttttatcaaaacactggatgccattatttctgtatgttaaagctggtgaccaggagctcagtggttataagcactggctgctgtggacccagggtccccagcacccatctgatgacttaaaactgtctgcaactccagtcttagaaggtccagcatcgtcttttggccttcgtagacactaggcatgtacatggtgcagacacacatacaagcaaaacacctatacacataaaaaccatagtttatgacccccacactgaagcatattgcctagcaataggactgaggagtcatcatagctggtccccaagttgagtgcctggttaccatgttagatagttgttgatttccttctttctttctttctttctttctttcttttttttttttttttgtctttttttcaagacagcgtttctctgtatagccctggctgtcgtggaactcactctgtagaccaggctgtcctcgaactcagaaatccacctgcctctgcctcccaagtgctgggattaaaggcgtgcgccaccaccgcccggttgttgatttgagacaaggtctcactatgtaggtaacaggccaggaactcacaggagtattcttgcctctgcttcctgagtactgggattaaagttgttactgccatgcccggccctcttctttgaatgttttaaatcaagcatttcacatacaagaacacacaaattatgagaatgtgcagttgagggagcacacatggaaacagcccttgggtgaagtcacagactgtttccctgaatcctcgacaccccctgtcctttcttccagctcttcctcagtgcttacttctacaagaaaaatctgacttcctagactgagattaatttcccctatttaaagcttttgtaaaaaaaccatgtaagtctttaactccggcatttgggaggcagagccaggtggatctctgagttcgaggccagcttagtctacagagtgagttccaggttagctaggctccacagagggaggttgggggaaaagaaaaaagaaaagaaaaggaaaaaaacatggcatgcacttaaattttttactactgtgtatctctgcttgatatgttgtatgagtggacacatacaccaaagttctgtatagagatcaaaggggagctttgtggaattcccttccactttggagtcagttccaggcataggactcaggtcttccctagggtcctctcatccaccccatcctgcactttaactgtctttgattggtgatagttttggggattgaacccaggtccttgtacagactagctccatccttagctctggtgtctactcttttgagtgttgtgtgttttttactttttaacagtgtttgagagattcatccatattgttatagttgtgtttaatttacttttattcttatagtgttcttttgttattgtaattctgtgttcaaactgtctttgggtgctttccagtttggaaagcctgtaagtagtgctgtagtgagtgcatcggcagtgtgtctaatcacagcacacagcgttaagctttggtaacgactgaggattgttgtagagttggttcactactttatactcgctcctgtaacgatggctttctgtcattctaagcctcccactgtaatagctgttttggagactgtagcagtaacaccatgtgagtgtttcttttgtaaaagtacttttttttcttagctaggtgtggtggttgtattattagtcagggttctctagagtcacaaaacttacggaatatccttttatgttgagggattttattgtaatgacttacagtctgtagtccaactaacccaacagtggtcagctgtgaatggaagtccaagaatctagtagttgctcagtcccacgatgctagttgtttcagctggtcttctgtagaagtagattccaacagatgtgctgactagtaagtgcaagcaggcatagaagaatgaaacttccttttaatgtccttaggtaggccttctgcagaaggtgtggcccagattaaaggtgtgtaacacctgcctagatctgggacttactttgtctcaggctgaccttgaactcagagatcttccctcagtctcctggggttaaaggcaagtattaccgtgcctgaccactatgcctcaagatctccatgtcaagatccaggtcagaaacttgtgtcttttggcctcaagatctggatcacaggttagccctccaattctgaattgtaactcatttcagatatagtcaagttgacaaccaggaataaccattacggtggtgtgcacctttaatcggagcactcagagtcagaagcaaacagatttatctgaatttgaggccatcgtggtttacatagtgagttccaggctagctagagctacttattgagaccttgtctcaaaaccaagtgagtgcaggcctacacgtggctaggtgtgcatgtggggacaggtactcaggagccagctctgtctttctacagtagtattggggattgacagcaggccctgttacctgctgagccatcttctgttgtagtttggtatacatttccctgatgactaatgaagttgagcatctttttgtatctcttagccactagactatcttgtgaaatgattacatttccactagaatataagtagaacatctgtctgtccttacctcatagtaattggtattcagtggaagttgcttctagtaaatcaacattaaaggaggcaaagaattctgaggataagttgttctagctctctgtcagactcaagctctctgaactctcccttcctggtccatagcagacaggtatgctatatctacttcagcaattacattttgtttctgtaggagtgatacattggtgtgtgtgtgtgtgtttggggggatgcatcttgcaggtgctctctggagtcatcatctgccatgtaacatagctcaggccagggggcatgttgtcaggcaggttgagttcagtaggcctcactggccctttagagggccagagttaacagaaggaagtgttttcccatctgcctttgccttccgaaaggcagagttagggtctgtgtccacaggactcatctactcatgtgtctcgttctttggaaagcaatactgttggtccaggagaatgacaagcaagctgcccactatcaggcagtctggatatagagctggactgggtgccagttgtgtatgaaaggcagctagccagtgcaagaagcccctggacctatgggacattgtgtccacccgtcatggggaggatgttaatgaccccttagggagctgaagttggctgcagttcctcttactgctgtctactcgtggacatggacttggggctgttgagagcctctgctctagaactgtgggccttaacttaaagtgagacaggattgttctcgcttacccagttcttgaatttgaaaggacaggcttttaaggtcaaacagcaaccatcttgtcacaagaatgaatgttctagaggtttatgctccctttttgcagtagtaatttgctgtggaatttctaaaggtaaattctaataggtactgaaaaattcaaagggtaaatgtttttataggttaatttttaggtttatgtgattggatagatgaattatactgtaaaccgttcttcatttttgttcctaaagtagctgtagaatatacatgggcaaggaaaatgtatgtgcttgtgaaatctggtttgcatggggcttacaaagtttgttttgactgccttaaaaagttagtaattacattttttaggagatattgtacagatcggcttgatgacatttgaatgttttcttttggaaacactagcaagaaggctcactttgtgctcagcattgcctgaataacctattgcaaggagagtattttagccctgtggagctatcctcaattgcacaccagctggatgaagaggagaggctgagaatggcagaagggggagtcactagtgaagactaccgcacatttttacaggtactgattttcgactcactgagccccattttattgtggaaatgcgggtgctctttagaggaggatgagccgttctcccccaggagtctgactcggtaattatcactctgctcctcctcacttgggaaatggggttgtacagcgtgttcttttaaacgtgcacactaattttaacccttttcccatccccctctgcccacaactactgcccatgaaaattgaacagcagccttctggaaatatggatgacagcggctttttctctattcaagtaagtagtccagagtgcagcgctgcctcatttccagccccgctttgtcctgaggctcagttgtggttgatgtgccacagtgtgccacagctctttatgtaacgatggaggcttctgcagctccttctgtaaactgtctgcagaagataagacactgcagagtgctacacgtacagagatgaccacaggacagtagactcttcactttagaacggctttgactgctcacatgcttaggacaggcaggcccttgctgcctatacagtcctcgctggtctgagacttgtgatcgtcttcccctctgtgtctccagactgaaattataggtgtgtgctaccacagtcagtttagagtggggcttttaaaaattactttctaagagagattgcttaatttgcatgtaggtgctaataactctaataaatttcagtgcttcaaactccccatctctggcatgtctgagaaattgcagtgtcttgcagtcttctatttaaatcatcctccaggattggattcctgttgggtaggttgtagccctctgaaggctggtatggagattgccctcaaggccttgcatgtgccgagctcaaactgaccccgagccacatcccagtactttacgttctatttatctgtgttggtttattctttttagtgctggggatgatatctaagacaatattctgctctagagaaaatctccagccctgtggttatacatacatacatacatacatacatacatacatgcatgcatatacgtgtgtgtgtctgtgtctgtccttctgtagcctagcatggcatggccttgaacaaagccctgctgcggcatcccagttgttggggttgaagtctgggcacggatgcctgacttcgtttgtgtacttgtgaagtccattctgacaatgtgagcgttgtccaaattctttctgaatctgtcttttgagagatctacttatgcaagtgtctttctttatactttccttctatgccacccttctagagtcctcattctctagcatttccacccagtacttcacttgtgacattgtgaggcccagtgggcttgtgctgagagtacaggtgagagccagcagtctcctgtggtgtcctgtgtggcactgcttccatctctgctctctcgcacttgcagttggtctgagttgtacatgtttctttgttgacttcctgggataacaggtggaatgttgtcttaatttctctctttttttttttcagcttgctatcatcaggtttgattttctgttcatggaagtttaaaatacatcaaaccttctttttaaagatttatgtgcccatgtgtggatatgtgcacatgagtgctggtgtctgtggaggacagaagagggcactggaaccctgcagttgacattacaggctgttgggagccctgacgtgggtgctgggaactgagcttgggttctgtaagagcagtgtatactgttgaccacagtcatctccccagtgcccagacctttcttttcaacccccagggagaatttatttactatacacctttggtgactgccattgcaggtagtaagtgtaggaagggatagttttacaaacagcacccacagtgtggcgtgcttctggatgtgtgagacagtgttatctacaaattctctgcttttctgacattcctcagaatggaaaagctctctttcaaaatggatgtgaggggctggagagatggcttccgtttaagaatgcttaatggtatttcagaagaagaccggctcagttcccagcatgtacgatagactgcttacaactgcctgtagctcctacatggacacctgatgccgtctggcctccacaggcactcagacacacttagataaaaaataataaaacaatacatctttaaaacttgcaatgaaataaaattaagttcacatgtatatattatttatggatttagtggggtgtcaagggaacataatttgtaaaagctatatcctcaaactatatatgaagaatagttgcttatagtagctgtgctacttaaacttggacttgaaggtttagctcatgaaaagttgttatttttcttttgacaggttataagcaatgctttgaaagtttggggtttagaactaatcctgttcaacagtccagagtaccagaggctcagaattgatcctatgtaagattttttcctatatttctttatttagatttgatttttaaagctgtaatttctgaatgaggacaaaatcatcatgaatgtctttgctttattctgtatttgatgcccttagacttcaccccgtcacctttttggtgcctttcttcagtgtcagtggtggccctgccctgagtcctgtgggggctttgtgcttagcatcactaagctcctatgggagacgcatagtgatgcgacttttattttttcaaataagtaattaagtattaataagtaattaagtatgtcattaagtaaatgataggagatacttgctagtacatctctactatcccaacttaacagtatatgttttgttttcttctagaaacgaaagatcctttatatgcaattataaagaacactggtttacagttagaaaattaggcaagcaggtaatatatcttctattttcttgtccttttatcataatctgtactctgtttgaaactaaaatttgatattggtctctttggaatgtatcctaggattctgtgcactctacccaagtctggactcaatttaacagataaaaatttcctagcttaagagaagataatcatcttctcttcagatttttaaaaataaacctatatatgttatgtcataatgaaaattttgtagtaaaaacagtgcatatgtggttaccgttacatatgtttttgtgtgacgatttgtgtttagcatagtactacaacaaagcctgagatcatggtgggaatgcgcattacgggatgggcttctttaggcgattctagtgtctggcagtacttacatctgtgcacagttaccactgaacgtggctttaaactagtcacgtaaggccttactagaatgttagagcttgctaaaggttattgaaaaccagcttatatagtcaaagggaatgaactgctaatatactcgcagcgtggatgaatctcagaaatgggagctaagacctaatgacagaaagtagaccgactagtgcttgtgtagggctgaagttggagagaaggcacagagggacctggagacgggactctgatgagggtgctccagtctcggtcatgttgatgtgggtgatagagattctttgaaacgacaaactgtagaagtggaaatataattatgtgcagttttatcccagtgctgtggcccacacctttgacctaggaagaccttgagaccagcctggaccacataatgaaaccctcaagagagatgggggagcgggaaggcactttatgtgccctagtaaaactgttatttaaaataaaaagaaaggggctggagaaatggctcattggttaagagcactgactgctctccagaggtcctgagttcaattcccagcaaccacatggtggctcacaaccatctgtaatgggatccaatgccctcttctggtgtgtctgaggacagctacagtaaactcatataaattaagtaaatgacttaaaaaaaaaagaaatataaaagattattaaaaaatataaaaaaaaaatgtcgagtgtggtggtgcacatctttaatcccagcagagatctctgtgagctcaaccaaagcttcagagtgagaccctgtgtttaaaaatccaacaataaataagaaacagaacattgaacctggagatgtggctcagcgagtatgactttactgctctctcagaggacctgagtttggttcccagcacccacgtggtggcttataactgtctataactccagctctgtggaggaggtgcctttgggcaccaagcacacacatgatgcacatacatacatacatacatacacacacacacacacacacacacacacacacacaaaattaatatattaaaaagaaagaatacagtgagttaaatcaatatatattaattatatattatgtatatatatgtatattgatttaattcactgtgttctttctttctttctttctttctttctttctttctttctttctttctttctttctttctttctttctttctttctgttagcttttaattcagtcacctggaaggagccagtcttcagtgattgtttgctgatatagatcattggcagtgatatacttataataagcacaagaccctaagattccacctcttgctccagaacaataaggaaagagcaatctttaggttctttgtaagctgcatagggagccagttaagagcggtgtgtatagtaaggtagcttagctggaacaggaatcaattatgaaaggtccagggtcaacttcatttaacttctctgcccttctcccttgtagccactgagggtttatttgtgcctttagaaaattatgacccagggctggagaggtggctcagtggttaagagcgtggactgcttttccagaggttctaagttcaatttccagcaaccatatggtggcttacaacatctgtaatagggtctgatgccctcttctggtgtgaagacagctacagtgtactcatataacttaaataaatctttttaaaaagaaaaaagaaaattatcacccagcattattttcctgtatcaagtaatcactggagttttaaggtctggaaatttaaaacccataaaaacttagtagaaataggaaaacattgttttgaacttttacaatttttagctcatttttggattttttacattttgaactagttttagtttgtctttgacaggtacaaagatagcaagaatatgtatattgatccttgattctgattcctattcttgtttaagaacagagttttagctggatgtgatggcacgtctttaatcccagcactcaggagggcttggctgatctgtgagttctgagcccagcccctggtcctgtgtaaagaaaggaatgattggaaaggttctttggctggggtcagaatccaggaagagcccttagttgtgcatggagttgagcatgactttttgcatttttctgttttaagttagggcacctctgaggttgtgacttacctaatgctgttaatcacatgtagcaatagcttagaggtcttgttagaatgaagtgctcgtcataaattctctccgtagagtgtcttttagaaattggagtcttttggccaaaggaaaaagtgtgttgctgtcatttttttgtctgtcaatatggcaggagtctgtgtgttggcctgacagtgtaaaacctcttagttacagctatcaaaaagggcatcttaagatactgccagttgctctccttttagaagttcaggttcttgtttttagaaaagcatttaatagtgacaaatgttcagcttttttttttttttttttggtttttcaagacagggtttctctgtatagctctggctgtcctggaactcactctgtagaccaggctgtcctcgaactcagaaatccttctgcctctgcctcccgagtgctgggattaaaggcatgcgccaccgcgcccggcttcagccttttttttaaagtcatagtattcagtactttaaaaattctcagtttgatatatttctattatttctatagtcttattaaattttggtgggttatatgcataacatgggaaattctttttacatataatattcattaacttaaatactgatttttttttcctagtggtttaacttgaattctctgttgacgggtccagaattaatatcagatacatacctcgcactattcttggctcaattacagcaagaaggtaaataagatcaaaagtttgcttttaaactttaaaagtagcttaaatatagctgagtcatgaattgtgactacagaagcactggtctccgatttgtgagtgtgacggtactgatttctggctgtggtttgagtgacgcagttctatgtgagtgctccctacactgggacatcccctgagcctggggcttcctttccattcctaagtgctcttttgcttttccgtcctccccctcacagggctcacaggaggaggggcatgctcctctcattcctgttggctcattttcagtcactgttcacttggtagattggtgcctttgagtaaccacctggattcgccatgccttgtctgtgtaggcatctgtgagctgccatttttattggagagtttggatgtctagttatctgtctcttttccttaaattcttagtcatttccacaccagtaactattcctctttcaaagattgttttgttcactcttgtcttggcattgccaatgagtgtaactcccttcagattctagtcataagcatcgcagtctttgaccatcaccttctaccttcatgacagtttgctgttccgaccaggctctgaagttaccatgagatccagaactcctcttaaatgattcttcaaggtgttttgttttgttttgttaccatgagatccagaactcctcttatatgattcttcaaggtgttttgttttgtttttgtttttttgagacaaggtttctctatgtaaaagagccctggctatcctggaactcactttgtagaccaagctgccttgaactcggagacctgcctgcctctgcctcctgagtgctgggtttaaaggcacgcaccaccatgcctggtgattgttttctttttttaaagattttaaaaaatttattttatgtgataagatgtttgcctgcatgattctgtgtacactacaagcatgcagttctcaaaaaggccagaagagggttttgggagtcttggaaatggattcacagacagttgtgagtcaccacggtgggtgcttggactagaacctgggacctctgcaagagcagccagtgctcttagctctgagccatctctccagtccctgagcctgtgttcagttgcattcgctggcttctttcctcatctttcctaaataacaagaatcttgaccacaggtaaagtagctcgtgaccctagacgtttcctgtatcatagcagctgaacatggcttcaaacttaggtgaaatatgttggttataattttgtgcttacagctttcaaatgaccccttgatagttatttcacaacttagctctccatttgttacacattgctattctttctggctttctcttgtattcttctgagaacatagacatgattccctttctggtagcagatctctctctttgtttctgtagcttgtggtttgagcctattaaaataggtgggcgtggccctccgtgtaaggtcagcccttcaacatgtactgtatccctgtggctcctgttcagtcaacattcagtttttgtctaatgctctcctgggttgaacattctcccactcccttaaaaaaagtctatgcatgggtaaaaatccctttccctccccctccattgattaaaaataaagtgcttttggtaactatgaaactttagctgcttgcccatttaaattttttccagtagaattatctatagtgcattgtctattgaactcattccacttgggttgtgctgtaaaccactcatcttcaaaagtctctcttctcactatccgggtgacttctacattgccagtgccaggattcaattcttagatctcctagtctaaacagaacacaataaacttgttattaaaaaacaaacagggctggtgagatggctcagtgggtaagagcacctgactgctcttccgaaggtcctgagttcaaatcccagcaaccacatggtggctcacaaccatccgtaacgagatctggcgccctcttctggagtgtctgaagacagctacagtgtacttacatacaataaataaataaatctttaaaaaaaaaaaacaaaaaaaaaaacaaacaaacgaacaaacatcccaaactaaaaacagatataaaaggcgaggaagtgatgtgccttcctgtgcccttcccctcatggcctgttcctttataccttgtccacttaaggctctaaaagtaaattctgtttgtttgtttatttattaaaaactacacactggcactatgattatacctaaaagtgttgcactttctggtgatggggattggaaatcccagttgtgcgtatgtgatgcagagctccactctgctttgtatccccagctggctagccacagagctgtgatgtcacagatacacagctttaagttccgtatccctcacctctgatgatttctttcacacgttaatctgagttgaaatcaggttcaataattgtattgggttagttgtttgttttttttcctaaatcttcttataagtttccttgtctctgttttttgcctttgatgtatttgccagtgttttgtcagggggatattgggttgtttgcctgtttactgcatcttggtttttttcttgtgtattttctgactgctggatgctctatagtgcctggacctgagatgtaggtacttaaccatgctcaagctggtttgggaattgtcttagtcagggtttctatttctgcacaaacatcatgaccaagcagcaagttggggaggaaagggtttattcagcttacccttccatcaccaaaggaagtcaggactggaactcaagcaggtcaggaagcaggagctgatgcagaggccatggagggatgttctttactggcttgcttcccctggcttgctcagcttgctctcttatagaacccaggactacaagccagggatggtaccacccacaatgggcccgcccgccttgatcaccaaccaagataacacagtggccttacttgtgggcatctgcctgtctcaccagttgctgcttttgaggatcatccttctcttcccagtgtgtaacgttggggtgacctgggctcagttcagcttcttccttaggtgccatttcattgcttcaatcacagcctatgatctgtgctcccataattctcagaatttgttctttagcctagacatttcctttggaacacctttgtgtggcagctcaggaagatttcaaatcaaacaggtccacaaaagacatttaaaatgtttattttaatatttaacgcgtatgagtgttttatttatgtgtgtgcctggtccccatggaagccagaaaagggcatcatcggatcccttggaactggagttgcagatggttgtgggctgccatgcaagtgctaggaatcacatgtgaatcctctgcaagagcagcgagcgctgttaacctctgcaccatccctcagagtggcttacccactgagccatctcaccagccccacagagtacttttataaaaacaaaatgtatattatgccatacccttacattacctgttagtggtttcctcgaacactcaaaataaattccaaagttgtaaataaaatccagaattactatgctgtttgtataaggcaggatatcttctcaggacgtgttcactaggtaccatagtgagctggcatgctgattctaggatttagaaacagttttgttagcagaaaacagattaagacatctgaactctgattaagcttgttcttaaaaaatgttaaacatagccgggcgtggtagcgcacgcctttaatcccagcactggggaggcagaggcaggcggatttctgagttcaaggccagcctggtctacagagtgagttccaggacagccagggctacacagagaaaccctgtctcaaaaaacctaaaaaaaaaaaaatgttaaacatattctttttagtgagcagccttctcattctttgtttcattgaagtacaagaaaaatcaatagtagaaaatgtttttaaaaaattaaacttaattgtggttgagaaagcttagcttattaggtatgtatttattaaaagttgctttgtactagtgtattttttttttctttctaaaccacaaggcacacaaactagattagggtactggcttcccagctcctgtttttggttagaaggcatctatgtatggggcagtgagcagggtgccatttccagcatgttttccagtgatttgtccattttagcagtcactggacatactaaccaagtgtgtcttcacaccagccatgtgagggaggttcctttatcctccttcaacaaagggtgccagcagagatgggtgagatagttgacaaaaccctgtggcaccggcaggtggcagagctaggctaaaacgcaggcagtcaattccggatcctcctctttagactgtgttcaggctctgccctcctagggaccttgtagactgcctttgtttcttgtagcccctgaggcttcgagatgagaagagtgatcctgtgtgacttaccgtagattaccttcctaatccaagcgagagtcggcactaaatcaggtcttctgtttttcctactgtgctctttctgtcagctatcatttcaaacaagtttgaattctttactagttgttttagtttgtttttgcctctttttaggttattctatatttgttgttaagggtgatctgccagattgtgaagctgaccaacttttgcagatgatcaaggtccaacagatgcatcgaccaaaacttattggagaggaacttgcacatctgaaagagcagaggtaaaactacgcgtgagtgtggcgtgtatggtggagcaccccttagaagagttaaaggtccatgcgtccattccttgtgtctgtgagtgcatgcacatgattgtgagctgtgtgatgtgggggctgggaaccgaacttggccctttggagagcaggacgtatttgaaccctgagccatctccctgccatttaatgtgtgatcactttaccgttggtgatttgggtaatttgtattttgtgcatttcttttgtagtgctggagatcagcctcttgttcatactaataaatgttctattcagtttatgttcaatctcctgggtttgttttgtattgttttgtcgagacagggtttctctgtatagtcctggctgtcctggaactcactctgtagaccaggctggcctcgaactcagagatccgcctgcctctgcctcccaagtgttgggattaaaggcatgtgccaccatgcccagccttcaatctcctatttttatttatttgtttattaattttttttgatcattttatttatatgaacacacttggatggagggctgggagtttgcgcgtatttaattttaagtatttatttgacaattttatacatgtgtataaatgttttcattatgtcgtccctcactaccctcttttatcccctgtctgttccctctgaatccctcccagcaggtccgcttcctatgctcattgctatttcttctcttccttctcctcctcctcctcttccttcccctcctcctcctcctcctcctcctcctcttccttcccctcctccttctcctcctcctcctccttcccctcctccttctctttctcctcctccttctcctccccctcctcttcctcctcctcttttttcatcccttctttctcctccccttctttctcctcctccttctcttcttcctcttcctcctccttttctccttcctgactcactgaggtttgcttacacagccagcctaccagtggttgtcccattgaagaaaagttactccccctcccttagcagccatagctcttcagctaggcatagggacctctgagtactccctatccatgctggaatgttgatgaattgttcttgtgcaggttttgtgctggtaactatagctgctgtgagtttatgagagcaacagacatattatagtgagaaaataacacggcagcatttcttcctaatctcctgctcttacatcctttctccctgctcttccgtgaagttccttgagccttagagggatgatagagatgtcccatctaagtctgggcatttagcggtcacttattctaaaacactttgaatagttctgctatttgctaggggagagggcagcttttcagcccaaacactaacctgtaggtctaactctatttagaagggtgattgacatgtctgtttattgaaactgcagtagttgtttcccctaccgaggacctgtgaccaacatagccatggacttttgaccaagtttatggtaccaggtcatacctacagaactacctaatgtggagtggccctcaaatccagtaaaacgatggttgggccaggcctggtggcacacctttaatcccagtacttgggagacaaaagcaggtagatctctctgagtttgaagccaaccagctctactgagttctaggacagccagagctagataatagagagacactgtctcaaataaataaaaaagaaagagaagaaaaagtggttgtttgccccataatagtcacgtcactcttgtgtagcagaagaatattacagcatcacatgggctggtttagactattagtgattttcccctccagcagcctttgtagaatctttcagcactgtgaaagcttgtcagcaaggtggaatcttctagcgcagttccagcttggtttctgttatgtaaccaaagtgttacataaccaacatctctgccaattaggtcttactatttagttctggtgggaaactaagaacgatgtctgcaaagaagcagcttttctctgagtggcactagtctataggtctgatgtgcttagaatgcagtttgacatggtcacatactatttgaggagcctctgtatttgtttgcttcttgatataagatctcaagtagctccaactggctgggagtacatatgtttgtgcctccatgttttatttatggtgatggaaactgaactcaggggattgtgaatgctatgcacatattcttcccactgcatttcatctccagcgcttacctcccccaaccaaaatgatttagtgtcaagtgattatttgtagtgttttggctctaatcctgcattttatgcatatactcttatcattgaacagttccttagtcccttccctgttcccttctgttgaaagacaggtctcattaagttgtccagttatcaaacttgacatccttctgtctttggctcaaaagtagctgatactcaacaagcatatgccactctgcccagggaggctgtgttttagtgaagtttatagaatcaacactttgaattcctagaatacattaggtttttatcagcactcagttgttgttagtagaccttatctaatagagcatgttttccatttaaaatctttcatttgcaagtgccttcatgtttatcagacttgatctaaagttgaagaatactggactagagagatggcttggtggttaagaggactggctactttctagaggacctgggtttggttctcggcacccacctgctcgctcacgaccttctgtctccagtgtcatcggatccagcaccctcttctggcctcctcaggcactacacacacattgtgcaagacatacatgcaaacaaaatatccgtgcatattggttagatttttgagacaggatttctaggctgtaattactatgaattcatttgttgtttagtgccctcaaagcagacctggagcgcgtcttagaagcagctgatgggtcgggcatatttgatgaagatgaggatgatttacagagggctctagccataagtcgccaggaaatcgacatggaggatgaagaagctgatctccgcagggccattcagctcagtatgcaaggtttggacatgttgatgtgtactttagtcatttttggagaagtggatcacgtccttaacgtttctgaaagttagtgcacttttggaagttctttgatagttactgcaaaagcaatagctccaaactttgagcatttctttaagattttcttgatcttaaatcatttttttataacttgcattatactaggactgtattgtgtttaacacatttaccattttggttgtggttatgctgttgagtatgatactgagccaatacaacactaatttaattacttttctagtgaccagatgccccttacccaagccagctgttttaataaattcacacagcacttactggctataaagacttatatagactatacagattaagactccagccatgtcacaggatgcatctttttcattgatgtaagcgctcatcatcagtggaggaaagggaaggcaaagccccttagggtaggcagagaaaagtgctgagacactcaaagccgttcctgagagcacaaagcactttatttttgtgattttgttttaatctaattcgtatgaagctgtttctacttctaatgaggttgctcatcatctaaattcctcaaaggtcttagtgtactgaggttttgttatgatggccattatcgttatcctagactcctcacctccaggctcacctctgcatactcttgtggtgtgaagtcccatgttatattaggaggggcttgttgggttattgaagtaataaacagaaaaccatcttaccattttcacaatttacatagaatctgtgcttggtacaattactgttgagagcttagaaacattcaagttgttaaaaacagatgttatggtcatccttcaaaggttgtgaggaatgccttgcctttgaaggtggagatgcaagttaaagagcacagaagtgtggtcttgatacttcttatacgaggtgaacagagagcttgtatcctcacatctgatgcatcacagatcgcatcagccttgcttgcagtaacacattgaattgtaagtccttaattagatttctaagacttccataggctttttaaagttacagaacagtagtggaatgttttaaaactttctagaagcttgctcctataagaacaaacatactactgcttgtacaggtatataaaataattttttgtgtttgtttttaggtagttccagaagtatgtgtgaaaatagtccacagacatcaagtccagatctctcttcagaagagctgcggaggagacgagaagcctactttgaaaagtaaagtagttggtacagattaaagttgcatatttaatacctgctgattttgtctgtttataaattactgcttaccgcctgaacctatgaacgtaagaatatattttctaaaattttttcagagaataaggtgtgaaatacttaatcgtttggagaaaaacgattgccagatcttggataaatttatatagactaggataaaggaaaccttgtgaaattttgcttatcaaaaggaaaatagacttaggacaagcagaactatgtcagtgcctattgatcctttgtatgtagcgttggtcacctatgagtcctgcttaccttctcatcagtagacagggaaaacagcatctgagggaggtggagcctcttcccagtgcagtggcacatgctccctagtctttctcttgtcgctttaggaggtccaagtccaccagcatcagcggcatagaagcataaatctgagccataagcttccgaagctatacgttgtactctgtctatacgtcctcggaagagaaacacttccacttttatagtgtcttcctttacagtaatcatcattcacaagtctttcttttattttttggtttgggcagggctttgttatgtactcctggtggcctcactgatggctatcttcctgtagtcctagctggtctcactactggtggctgttctcctgcctcagtttcccttgtactaggacaggtatatgttgtcgtacctagatttttattttaaaccatactccaccttaaaagttaaataatccatagtagataattgaaccctctgacctcaggtcagaaaggtaaggccagggatggactctgcctggttatataccacatctctcaattcagccatgcatttattttcacatttcaaaatctctgaaaagatgggctttttaagcagctcaaagggcagtgctcagccagtatgaatgagcccccagcccccgagtgcagcacagcagcccctgagcttgagctgattagtaaggcttggactgttctgcatcggctagtgtctgaaggtaatgtttaccttgttctgtttgctggttttttaagtcacaactcataagtatatgaaggaaagttctgatcagctgacatcctcttaatgtgagatatttctagactttattcagtcactgattaatagatttaattatatttacattttagaacagtcttttagtgttttttatgtcctttgagtttttgaaattattactctttaaattatgataaaccttagatttatgtataatgcactcatacttgttactcgttgttggttgagaccagcacacagcccagtttttatgcctctgactcccgttctttccgttctcccacggcatcgggcttgctccaagtcacagtcagcgtgtcattactttttgtgtgtgtctccaaaatattgtgggacgtgtgcttgcttgtgatctgtagggttgcttctggctttgtttttgtgtttttttgagcaatctagctcactgctgtgcaagtcctcaactcctgattatcctgactctcactccgagtgctggagtgcgggtgtgcacaccacatctgacttgactgtttctctctttatttctcctaattagtgctgttgtcacaatatagtaataacaacaacaacaacaacaacataaatatctagttttaaaaagaacttaaaattacttaagtaggcaaaatgagtattctagaaagtttaagtttcttaaaaagtttgttcctgccaggcagtggtggcacacgcctttaatctcagcacttgggaggcagaggcaggcggatttctgagtttgcggccagcctggtctacagagtgagttccaggacagccagggctacacagagagaccctgtcttgaaaaacaacaacaacaaaaaaacaaaaacaaagtttgttcctactatcccttccttcagtaagtgttgttagtgactgtatattcccttctgtcatacacatattcatagtctctctctcagtgtgtgtgtgttcatgtgcgtgtgcatgaacatgtgtgtgtgtgtgtgtgtgtgtgtgtgtgtgtgtgtgtgtgtgtgcaatacgctatctatggttcataggaggtccaaagacaaggctcgcaggttttggtccctcttctccctccatgtgggtcctgtcagtggcccagggcatcaggcttggctgccagcagggtcttcacttgctgagctttgtcaccacctccttttttgtatataaacattttgttaccttttttgaaatgagaatttgaagcttccactgacttacacttttagcagcagtaaaggtaactcagtcccattccatgacgggtcagtgatctatagcaaccacagtgtaaagccgtaacttgcgcttttgagctgacagatttgggcccatcttgtaccctttgggaaaaaaaataaaaacactttgggtatgagcatgcctcttttctagtggtagattgtgtattaaagattgcttctagctttagtcttttatcttctgctgagagcttagacagctagaatattctacctagtcacagatagccaagatgaattaagggttaactttgtagtatttatttttaacattaactagtatttaaaagtgctagtgtgggctggagagatggctcactggttaagagcacttactgctcttccagaggtcccgagtccaattcccagcaaccatattgtggctcacaaccatctgtaatgggatctgatgccctcttctggtgtctgaagacggctacactgtactctcagacataaaacaaatcttaaagaaataatgtactagtgtactacagattttaagaagaaggtgtgcgtgtgggggtggggtgggggaggggtgctggagggtggctcattggttaaagtacttcctgcgcttgccttttcctcaaaccctccatttcttagctggaatagctccctgtttctctaggctctgtcttggctctaagactctgacttccttctttccctccaagctggccctgctgtcagcctattactcacaggtcagcagtcttccctcgtctccccactgcctctgaaggcctcatacttaatggaaatatgaaatatgacacattataggatttcttttcttaggtaaaaatgttactaaaaattagcctactataaattcatagcttatgagtaagggttactaagtaatgtttccttgacatgacattttttttagcagtgatgtgtaaataaagtccactccggcattgttaacacctgctattgggagcataggagtcagtgatgggactgaagactgtcggctgctgcatgctctacagatgtgtgtcagcatcacttacgtcctctctaggatggctttgaatgccgtggtctatctgctacaagaagcggtgtttcccagcagaacaataacacacattcgtagccaaggagtcctgtgatgctttgactgcttattcttgcactgtagctttcatggtgtgacctagtttatcagacagttcagtttaagagacacaaataggtaggggcgtttaagcgaaacactaactaatagttaagttaggggcttaacaatcttaggcattgttctgagccaggcttttgaaatatagaccaatttgtgagaagggctgccaccattgcctgattagggtggtggggtcagtggagagcgcccatgttcagttcccagaacgacccctatggctcataatcacccaagactcagaggattctgcactccattatcacccctgagggtatgtgcgagtgcacacccctgcacgtatgcatgcacgtgagcacacacacacacagagtctaaaacattagatcttttatataacatatttaattagtaaaacattttcttcaattttttatatgtatgggtgtttttcttgcatgtatgtatcagtctcacgtgcatgtagtgcctgaggagccagagaggatattagatccccctgggaccaggattgtagatggttttgtgctgccctataggtgctggaaattgagcccaggtcctttgaagaacagcctgtgccctcaactgctgaaccagctttccagtccctaactaaatcttatcaacaaacaaacgagcaaaaccccagaaattatgtatagctatgatatagttgtcaagactttctggttccactgaaatagctgtgaggcaggattcaaggctgaatctccatgactttgcttactaggaaaacagtgtgtctcactgactcatttatgctttttgtagctcatgtgggttcttagtctgcagccagagaccaggttttagctctgtactgctgtaagcctgaaggaagacatggtgggaggttctgagggactcattccctagcagcatcttcagggcttcacagtggttgggtcagggttggcagctgatttctgttctcattttgcataatgtaaggttataataaccccatgaatatgtacaatattaagtgaaaaattaaaggtaaattaaagggtaactctctgaagttgcattcacacatagaatccgcagagctcaggcctcccttcacatcacccttgtatagaggtttgtagcatcaggaagtcagtattttgcctcaaaggccaacaggaggaaagtggagtgcctacaatctgggttaactttattgctcgctcactttaaaaactcaagcctggggaggacaggcagggtgcccttgggaggggaggccggcagctcctggagttcaaggccatcctggctaccaacctggactagagaccgtttgaaaattgagaagaacaataggaaaaaagtatgctaactataacttagttttaaagttttggtccttttaaaatcacacaacttttaaatctgacttctatgtcatttatgggttttcttggtttttagctctcttgtgtgtttaaagcagaactagtgtgcagagctgcttgcccctcgcaatacactttacccagaggcgtctggaagtgttcttattatagcttggtattcagcatacattttctgaacacaaggatacattcctgcaatgtgttgttttgttttgtttgttgttgcttttgagatagggactgatatgttaccaaggctggtattccattcctgggctcagatttccttttcctttggccagttgggtgactgcaggcatgtgtcacaatgagcttcgctacttttgctttgagacagtgtcttagccagtgctcttgctgtaatgaggcataatgatctcggcaactcaaaaaggggagtatttaattggggctggattacagttcagagatttagtccactgtcacagcagggagcatggcgggatgcaggtagacatgggctggagaagtagctcagagtcctacatcggcatccatagacagagagactgggcctggcataggcatttgaaactttagagtccacccccagtgacacacttcctccagtaagatcacacctatatgaccctgtggggccattcatattcagactattacattctagtccctggtccccacaagcttgtagccatgtcatagtgcaaaatagtccaacttcaaaggtcaccatagtctcttggtcttaagactgcttcaaaatctaaagtgtcttctgagattcatggcaatctcttcactgtaatcccctgtaacatcaaatcacaggtcacaacatacagtggttctgaatatagtcatttctatgtctttaattcttcaagtctgtgatgaagctgctgtgtgacaaggcacagtttcaggtactgggacacaggtaagcagcatcaggttgagctctcattgcttacagaccagacagagtatcaagacagtatgtttgtgccgagaatgaaaatgaaatagtgagaaagccaggaggttgcttgaaacgggatagtcggagagggactccagggagaaacttagtaaatccaggcttgagtggcagcgagggagccagcccgggaaagcacattaaagtgagatagtttgtcttatcaaaggtgttttccagtggcttctaacagtgataaagatatataaaccaacactcatttgtgtaagaatcactactagtgaaccttgaacagaaagtgcaaatacctacctcttctctgataattcaaatgtgtaggttttttgaatcagaactttgacatttttatacttgtaattattaaactaatttctcaccttctgaggtattcaggcagtgaccattttgattcatggaacagcttatttcctacgtgattgcctgctctcctggcagatctcctatgcgttgttttaacagatattcacgtttgaatgtttcaggcaacagcagcagcagcaggaggtagaccgacctggacccctttcatatccacgtgaaagaccgaccacaagttcaggaggacgtaggagcgaccaaggtttgctttctgtccattcacagtgatgctttactcgatacccaagatcctcgtcaattgtactttatatttctcctcctcctcctctccttcctcctctttctcttccccctccttctttatattgggttttttatttgtttgtttctatctttttctttttttttcttttctttctttcttttttttttttgagacagggtttctctgtatagccttggctgtcctacaactcactctgtaaaccatacatagagtcataagagatctgcctgcctctgcctcccagcacagtgattaaagatgtgcaccaccacctggcttttccttttttaaaaatttatgaattttatgtattagtgctctgtctgtatgtatgcctgcatgccagctgagagcatcagatcccattataaatgttgctgggaattgaactcagaacctctggaagagcaacccatgcttctaaccactgagccatctctccagcccccttttcttctttaattgtattataaaactctttttgttttttggttttttgagacagggtttctctgtgtagccctcagctatcctggaactcactctgtagaccaggcgggcctcgaatacagaaatccatctgcctctgcttcccaagtgctgggattaaaggcgtgcaccaccacgcccagcttataaaactcttaaaaatgaatttgtaatataccaatttcctctgaactataagggagatagacacttggtagttgtttggattttatttatttaatgtagttttggttttgagacagtttcattatgtagctagggctagcttggaactcactgtgtagcccagactagcttcaaattcatgagtcttcggtttgggcttttttagaagtaacaggaacaggcatgcaccaccatgccctggttggttctaaaatcgcacacatagtactttaacttcacagttgacacattcctgagaaatccttcagagatgattagaggtaataaataatagtaagtggaaaggaaacacatttcaccacttagtaaaggaaaccatctcgttagcatagtctagataacagctggaggccaggtgactactcacccatcctccagacagcagctgttaagctcgagtcaagtattggtagaagctgaatggagaagaagccctgtctgtcagaggacttcatagaatctatgcagagctctcagagtgacacaaaaacagtaaaaaaaaactgatgaaggggtgctggagagatggctcagcagttaagagtgctgactgctcttccagaggcccagagttcaaatcccagcaaccacatggtggctcacaatcatctataatgggatccaatgccctcttctgatatgttcaaagacatcattgatgtactcacatacataaaataaataaatagataaatcttaaaaaaacaaaaaaaagactggtgaaggattgtggatgtgagatgtgtcttgcactagagagcacattacacagaatcctataatgcagctgcaggtggctttgacacctctgtcctacttgggcacctgcggtcaatgtgcatatatcctacacagatgcctgtatcagaggaggctcaccgaaaggaagatttcattaaaactcacaaggtgacaaaacccaagtacccagggttcacttggaaacaaaccactgttattccaggaaccatgaaagaaggaaccacgtggacaattttaattgagcattgctttttggttttttgttttgttttgttctgtttcgaggcagtctcactctgtagcccagcctggctgtgaattcactattgtcccacgtctgcctctggagtgctgagactctggtcacccgcagccacctgcatctcacacattttagagcagaagagtaactgaaatgtaaaagctcagtgaatggacttagcatagaaagctggtagactagatgacaggcatgtagaaatccttcccatcaacacggcaaactgactgtagccaatgagcagagcgctggaggcatctgacattattagctcagcctaactcacaggagcctcctaactggaagcagaaggggtggtgaaaacatctgatgatcttttcatcgtctcagctgaacagaaactagaagcctgcaagtggaagaaattgagtgaacttcaaatttatgtaaacgaaaagaaatacttactaggacttctgaaaactgaaggcataatcaaaagaaagaactaatcaaagaaagaactgttcttcaaagaacagcaatttgaagtgggaggtgtctatgagtgacagtggataatgtggttcccatgctgaaagaaacctttaatccaggactacatatgctggacttacatacttactaggattgggaaagagtttcaaaaatgtctccagcagttaaagaaagggatggctgttcagggctggcaatcagatcagcatctcgattagccaccatcagagatgcttgtacttgcagtggatgggaacaaatgagtaactggcttggaatacactaaacaggatgtgtcatcaaaccctgcccttcaggcttcagggaactttgagggaaaggtagcagaaagatggtcagagctggtgggggcggaagacaccaggaagcagcgccttcccgacacagcagagctgatgcgcggatgaactcacaaatggtggcagggtgctcaggtcaagccttgtggtgtctcgcagctaagaggggggagtgagtgaacgccatctcccatacctaactcagaagctatctctagttgccaaacctgacaatcttaatctaaccatcagaacccacgtgatggaagcgggcactaactctgtctgtacatgtcatggcacactatgcccacagagttacacacagttaacaaagtctttgtggggaaaaaaaaaacaaactagtattcaagtagaaatatgtttgctaagaatttgctttttcttttttcctttatcttggacaggtttcaagtagcttgggctggcttcaaatgttttatatatatagtcaaggacaaccttgagttctgattctcctgcctctgtttcctaagagctgggattacaggagtgtgcctccatttcccgtgttatgccatgctagggattgagcccagagccttgcgcatactaggcaaacgttctaccaacttagctatagctctattcagaagtttgccagtgatggggatcttgcagaagttgttctgagaactctgttttctttcccaggaggcgacgctgtgagtgaagaggacatgcttcgggcagctgtgaccatgtctttagaaactgctaaagacaacttgaaagcagaaagaaaaaaatagtacctttaaaagtcattttgctactcacactttgtaacattgtctgtgtgattacagtgtaagggccactttggcagtatgttcaccagaagagataaagacactgtagtggtttgtaagcagaaaggcagaaatgtgtcataggactaaggaacgatcgagatactagccaaagaggcagtcagcaatgaaagaaacttttctaaatgtcccgttttgtttttcaaatgtgcaatatctgactgaaattatggaatttttgttggctcttttggaccaactgattagctcttgccacagaacttgatcctataatgtttcgttttctctctgcattgggggtggcttggctcacttgagcttttacttcatttcagacctaccttttatgaaatgtcttttatatgtcttgttacagaaagatcagtctgtcttctcatacatatgtcgggcacgtggatgcttcctggtggtattttctctaatgtggtgatgtgttgcttttaaagcctttgttagtgggatcacatttcctaattgtgctgcattcctctactctgcagtcagctctgttcttgtaactgagcacgtgagcgtgctctgtctggatgccctgagagtggctgactcctggctggagcccttcctgtaccttccttcctctcttctccagctgagaaaagaggaggcagaggacacaaacagatttccttctacgtaacatgcaccatgaatgcaccacaggagaaactcgcccttcagtcctggtggtgggtttgtcctagtttttcatctgtgacaggagctttgtgttctaatcacgattaagtcctggaaaatagatgcctgcttcactttctaaaaattaaaaatatttttttttctttttctagtagaaaataggctgctaggatgatggtctagaatctgaaagtaatttactaataaaatatatttaaataatactgtgggttgacccttgcaatcatgtttaaatcgcttaagaattacagaagtcacaaagcttaaagggtctgtttgtaaataggaaagtccttagttttgataaacattaagcaggatgcagagctagtcttgctgggtcaatacgtggtatgatttgggtggaaattaactctgtgtctttgtcatggtgtcatagataccctgatacctgctttcccctccctcccctttgaagcccctttgaatggtgacttgtacataggtaaagtccaagaagagattgtagccagcttaggaaggggcagcatgctatagtgctctactggtgtgtgctctgcacacgtttttatcagggaaagttttggatgtaggatttattgctgtctaactgaaaaagatacaaatatttttatttatgcttatgaaatagctttttcttgataggatggatgtttggtttggtttggttgtgcgagggattgaacccagggcctccagtgtgctaggcaagcgccctacctctgagctatatccccagatccagaacaggggtttccttgtttgctttttgttgtttttcttagccattttgtgccaactacagttgttttttaaaaatttgcttcatgaaaaattaggcagtcctattttaaaatctatgaagttttctttcagtaattgcaaaggttcagaagagttgggcagctgtagggtgttagagttaggactttgcttacagttgattgctatactgaagtatgtaactactcccgtatgctgctcacatgtctagacattcattggcccttttcctttaccctttgaaaaatcacattaaactttccatacatttagattggtgtgctgcctgatgaaaaatgagaaagccaatatacacttcagctttaactttagagtttataaaatgttcatataacacaccctacttaaatcatgtatgaaatacagcatgttagtcttttattagaaatgttttaaagagaaactgagcacacactgaatctatttgagtgaagctttttagtttgttatatttatggcattgtccaggcagatccaaaatcaccattgaattgccatcctctttgggttgacctaggcttactaaacatttagatttcattattaatgagtagccagtatgaaaagatgccaatgcttattctagccacagtatccaaagtgtaggagttctatgacattctaattcataaccaggagttgctgtttatagtactgcaggacagacaggggcaagggactccactgccacggctggtcacagactcgactaacttttccatttgtttttttaccaattggaatacttaaatgtattgtatgtaatgaatactaaactactgataatcattttttttaaatctgtaacttgttctgccagataaaatgcgtacagccgtgatgctagtgttataaccaagtgtaaggaccctttggaaggccagacatggtgctgtgttcctttgatgctggtacttaggagaaatctgcagaggtaggcagatttcttcttgagttcaaggccagcctggtctacatagtaagttccagactttctggagctgcacagtaagaccctgtcttaaacaaaaaacaaacaaaccaacctttggaaagatcactttcatattttgggatgtcatgagcttatctatgtttcaaaattcagaatagctgtcctttggcctaaaccataaatctacacccccaacgacagtactatgcagacatttcactgatttaagttgtttgatacagtcagtgcaggtgaactccatgctaaagttttaagccttggccaaataacttacacctcacagactgtctgaggcggtgcttctttttttcctgaaaacttgatttttcttgatgaagccaaagttaatgagcatgaattctcaaaggagtagtctgctttgttttacttaatatcaggttgagtgaagtaagttttattcgtgtcagagtctaagccacacattttgaatacccacatgtttgatactatttaagtcatgctgtgccaagagttactaaattcttagaactggccctgtgccctgcctaaggccagacagggcagtgcggaacccaaatgtgctatctgagagtcttaagctaggaaatctgggtgttttaaattagtgagaggtttcagttagtgttgaaacctccagatccgacttgatgttaggcagtgtggatgtgctcagtggtagagcagttacctagtggcccaggccttgggttcagtctctaacactgcaaaaggagagcagtggctcacagtgtaacctacgtttagagagacatgaaaggaagtactttcaaagtgaatgtttgttgtaatttagtcctaacaagtgtagagctatgatatgtgaccttaattaagaaaaaccagattggatcagtagtatttttgttgtttttcatatttaacataaaaattcccttcatccctaatttgtttataattaaagagacaaattgattttgtattttttcaaagttttatacatattaaaagggttttgttgtagtctatcatgaatgaaaaggatatttttttttttaatttgaggaatacttttgtgtgtgtgtgcctaaaatggtctgtcattttaagaattagcacaaaaaaaaaattagctagttcctaaatgtatggaggtttaatagtaccagtacacagttgtgggtgaggcactagtgagaagtgtgtgggaaatgcagctgggtaggtgggactcacttgtctctgaatggtttaaaggtggtatttcctggaatttttttaatgattttttttttcaaggaagacagacattcgaaatgtgcttatcaaatttctacaacactggactaataggaataactttttttttaaaaaaaaaagactgttctgtataaataaaatatatgaaactcaagtgcaaaagccgtgaaaataaaaggcattgtcttctgtcaatgtgatgcactgtggccgagcagttccctcaggactcaactctgcagcccttcctcctgtgcctcaagtgtcggctgccactccacaggtcttccgtctgtcggctcctttgaaagccgggcttccaaagccctgttgaacactgagggttctggtgatgtgtgttaatgagttgtattttaaatatcagagattattaaataaagagaatgattttctattaa

SEQ ID NO: 4 - DNA, 14 bp, Artificial sequence
  Synthetic oligonucleotide
aagaaaccaaaccc

SEQ ID NO: 5 - DNA, 14 bp, Artificial sequence
  Synthetic oligonucleotide
aaagaaaccaaacc

SEQ ID NO: 6 - DNA, 14 bp, Artificial sequence
  Synthetic oligonucleotide
aaaagaaaccaaac

SEQ ID NO: 7 - DNA, 14 bp, Artificial sequence
  Synthetic oligonucleotide
caaaagaaaccaaa

SEQ ID NO: 8 - DNA, 14 bp, Artificial sequence
  Synthetic oligonucleotide
ccaaaagaaaccaa

SEQ ID NO: 9 - DNA, 14 bp, Artificial sequence
  Synthetic oligonucleotide
tccactcctaatac

SEQ ID NO: 10 - DNA, 14 bp, Artificial sequence
  Synthetic oligonucleotide
gtccactcctaata

SEQ ID NO: 11 - DNA, 14 bp, Artificial sequence
  Synthetic oligonucleotide
agtccactcctaat

SEQ ID NO: 12 - DNA, 14 bp, Artificial sequence
  Synthetic oligonucleotide
cagtccactcctaa

SEQ ID NO: 13 - DNA, 14 bp, Artificial sequence
  Synthetic oligonucleotide
ccagtccactccta

SEQ ID NO: 14 - DNA, 14 bp, Artificial sequence
  Synthetic oligonucleotide
actctttccaaaca

SEQ ID NO: 15 - DNA, 14 bp, Artificial sequence
  Synthetic oligonucleotide
aactctttccaaac

SEQ ID NO: 16 - DNA, 14 bp, Artificial sequence
  Synthetic oligonucleotide
caactctttccaaa

SEQ ID NO: 17 - DNA, 14 bp, Artificial sequence
  Synthetic oligonucleotide
gcaactctttccaa

SEQ ID NO: 18 - DNA, 14 bp, Artificial sequence
  Synthetic oligonucleotide
agcaactctttcca

SEQ ID NO: 19 - DNA, 14 bp, Artificial sequence
  Synthetic oligonucleotide
cagcaactctttcc

SEQ ID NO: 20 - DNA, 14 bp, Artificial sequence
  Synthetic oligonucleotide
ccagcaactctttc

SEQ ID NO: 21 - DNA, 14 bp, Artificial sequence
  Synthetic oligonucleotide
accagcaactcttt

SEQ ID NO: 22 - DNA, 14 bp, Artificial sequence
  Synthetic oligonucleotide
ctcctattaaataa

SEQ ID NO: 23 - DNA, 14 bp, Artificial sequence
  Synthetic oligonucleotide
cctcctattaaata

SEQ ID NO: 24 - DNA, 14 bp, Artificial sequence
  Synthetic oligonucleotide
tcctcctattaaat

SEQ ID NO: 25 - DNA, 14 bp, Artificial sequence
  Synthetic oligonucleotide
ctcctcctattaaa

SEQ ID NO: 26 - DNA, 14 bp, Artificial sequence
  Synthetic oligonucleotide
gctcctcctattaa

SEQ ID NO: 27 - DNA, 14 bp, Artificial sequence
  Synthetic oligonucleotide
tgctcctcctatta

SEQ ID NO: 28 - DNA, 14 bp, Artificial sequence
  Synthetic oligonucleotide
ttgctcctcctatt

SEQ ID NO: 29 - DNA, 14 bp, Artificial sequence
  Synthetic oligonucleotide
tttgctcctcctat

SEQ ID NO: 30 - DNA, 14 bp, Artificial sequence
  Synthetic oligonucleotide
ctttgctcctccta

SEQ ID NO: 31 - DNA, 14 bp, Artificial sequence
  Synthetic oligonucleotide
cctttgctcctcct

SEQ ID NO: 32 - DNA, 14 bp, Artificial sequence
  Synthetic oligonucleotide
ccctttgctcctcc

SEQ ID NO: 33 - DNA, 14 bp, Artificial sequence
  Synthetic oligonucleotide
accctttgctcctc

SEQ ID NO: 34 - DNA, 14 bp, Artificial sequence
  Synthetic oligonucleotide
aaccctttgctcct

SEQ ID NO: 35 - DNA, 14 bp, Artificial sequence
  Synthetic oligonucleotide
aaaccctttgctcc

SEQ ID NO: 36 - DNA, 14 bp, Artificial sequence
  Synthetic oligonucleotide
aaaaccctttgctc

SEQ ID NO: 37 - DNA, 14 bp, Artificial sequence
  Synthetic oligonucleotide
aaaaaccctttgct

SEQ ID NO: 38 - DNA, 14 bp, Artificial sequence
  Synthetic oligonucleotide
caaaaaccctttgc

SEQ ID NO: 39 - DNA, 14 bp, Artificial sequence
  Synthetic oligonucleotide
acaaaaaccctttg

SEQ ID NO: 40 - DNA, 14 bp, Artificial sequence
  Synthetic oligonucleotide
aacaaaaacccttt

SEQ ID NO: 41 - DNA, 14 bp, Artificial sequence
  Synthetic oligonucleotide
aaacaaaaaccctt

SEQ ID NO: 42 - DNA, 14 bp, Artificial sequence
  Synthetic oligonucleotide
aaaacaaaaaccct

SEQ ID NO: 43 - DNA, 14 bp, Artificial sequence
  Synthetic oligonucleotide
taaaacaaaaaccc

SEQ ID NO: 44 - DNA, 14 bp, Artificial sequence
  Synthetic oligonucleotide
ataaaacaaaaacc

SEQ ID NO: 45 - DNA, 14 bp, Artificial sequence
  Synthetic oligonucleotide
aataaaacaaaaac

SEQ ID NO: 46 - DNA, 14 bp, Artificial sequence
  Synthetic oligonucleotide
taataaaacaaaaa

SEQ ID NO: 47 - DNA, 14 bp, Artificial sequence
  Synthetic oligonucleotide
ttaataaaacaaaa

SEQ ID NO: 48 - DNA, 14 bp, Artificial sequence
  Synthetic oligonucleotide
tttaataaaacaaa

SEQ ID NO: 49 - DNA, 14 bp, Artificial sequence
  Synthetic oligonucleotide
atttaataaaacaa

SEQ ID NO: 50 - DNA, 14 bp, Artificial sequence
  Synthetic oligonucleotide
ttaaaataaaaatt

SEQ ID NO: 51 - DNA, 14 bp, Artificial sequence
  Synthetic oligonucleotide
tttaaaataaaaat

SEQ ID NO: 52 - DNA, 14 bp, Artificial sequence
  Synthetic oligonucleotide
ctttaaaataaaaa

SEQ ID NO: 53 - DNA, 14 bp, Artificial sequence
  Synthetic oligonucleotide
tctttaaaataaaa

SEQ ID NO: 54 - DNA, 14 bp, Artificial sequence
  Synthetic oligonucleotide
atctttaaaataaa

SEQ ID NO: 55 - DNA, 14 bp, Artificial sequence
  Synthetic oligonucleotide
catctttaaaataa

SEQ ID NO: 56 - DNA, 14 bp, Artificial sequence
  Synthetic oligonucleotide
ccatctttaaaata

SEQ ID NO: 57 - DNA, 14 bp, Artificial sequence
  Synthetic oligonucleotide
tctaacttaataaa

SEQ ID NO: 58 - DNA, 14 bp, Artificial sequence
  Synthetic oligonucleotide
ttctaacttaataa

SEQ ID NO: 59 - DNA, 14 bp, Artificial sequence
  Synthetic oligonucleotide
attctaacttaata

SEQ ID NO: 60 - DNA, 14 bp, Artificial sequence
  Synthetic oligonucleotide
cattctaacttaat

SEQ ID NO: 61 - DNA, 14 bp, Artificial sequence
  Synthetic oligonucleotide
acattctaacttaa

SEQ ID NO: 62 - DNA, 14 bp, Artificial sequence
  Synthetic oligonucleotide
tacattctaactta

SEQ ID NO: 63 - DNA, 14 bp, Artificial sequence
  Synthetic oligonucleotide
ttacattctaactt

SEQ ID NO: 64 - DNA, 14 bp, Artificial sequence
  Synthetic oligonucleotide
tttacattctaact

SEQ ID NO: 65 - DNA, 14 bp, Artificial sequence
  Synthetic oligonucleotide
ttttacattctaac

SEQ ID NO: 66 - DNA, 14 bp, Artificial sequence
  Synthetic oligonucleotide
tttttacattctaa

SEQ ID NO: 67 - DNA, 14 bp, Artificial sequence
  Synthetic oligonucleotide
gtttttacattcta

SEQ ID NO: 68 - DNA, 14 bp, Artificial sequence
  Synthetic oligonucleotide
tgtttttacattct

SEQ ID NO: 69 - DNA, 14 bp, Artificial sequence
  Synthetic oligonucleotide
ctgtttttacattc

SEQ ID NO: 70 - DNA, 14 bp, Artificial sequence
  Synthetic oligonucleotide
ttcaaatatttatt

SEQ ID NO: 71 - DNA, 14 bp, Artificial sequence
  Synthetic oligonucleotide
attcaaatatttat

SEQ ID NO: 72 - DNA, 14 bp, Artificial sequence
  Synthetic oligonucleotide
cattcaaatattta

SEQ ID NO: 73 - DNA, 14 bp, Artificial sequence
  Synthetic oligonucleotide
ccattcaaatattt

SEQ ID NO: 74 - DNA, 14 bp, Artificial sequence
  Synthetic oligonucleotide
cccattcaaatatt

SEQ ID NO: 75 - DNA, 14 bp, Artificial sequence
  Synthetic oligonucleotide
ccccattcaaatat

SEQ ID NO: 76 - DNA, 14 bp, Artificial sequence
  Synthetic oligonucleotide
gccccattcaaata

SEQ ID NO: 77 - DNA, 14 bp, Artificial sequence
  Synthetic oligonucleotide
tatacatttttttc

SEQ ID NO: 78 - DNA, 14 bp, Artificial sequence
  Synthetic oligonucleotide
atatacattttttt

SEQ ID NO: 79 - DNA, 14 bp, Artificial sequence
  Synthetic oligonucleotide
tatatacatttttt

SEQ ID NO: 80 - DNA, 14 bp, Artificial sequence
  Synthetic oligonucleotide
atatatacattttt

SEQ ID NO: 81 - DNA, 14 bp, Artificial sequence
  Synthetic oligonucleotide
aatatatacatttt

SEQ ID NO: 82 - DNA, 14 bp, Artificial sequence
  Synthetic oligonucleotide
aaatatatacattt

SEQ ID NO: 83 - DNA, 14 bp, Artificial sequence
  Synthetic oligonucleotide
caaatatatacatt

SEQ ID NO: 84 - DNA, 14 bp, Artificial sequence
  Synthetic oligonucleotide
tcaaatatatacat

SEQ ID NO: 85 - DNA, 14 bp, Artificial sequence
  Synthetic oligonucleotide
ttcaaatatataca

SEQ ID NO: 86 - DNA, 14 bp, Artificial sequence
  Synthetic oligonucleotide
attcaaatatatac

SEQ ID NO: 87 - DNA, 14 bp, Artificial sequence
  Synthetic oligonucleotide
cattcaaatatata

SEQ ID NO: 88 - DNA, 14 bp, Artificial sequence
  Synthetic oligonucleotide
ccattcaaatatat

SEQ ID NO: 89 - DNA, 14 bp, Artificial sequence
  Synthetic oligonucleotide
tccattcaaatata

SEQ ID NO: 90 - DNA, 14 bp, Artificial sequence
  Synthetic oligonucleotide
atccattcaaatat

SEQ ID NO: 91 - DNA, 14 bp, Artificial sequence
  Synthetic oligonucleotide
tatccattcaaata

SEQ ID NO: 92 - DNA, 14 bp, Artificial sequence
  Synthetic oligonucleotide
ttatccattcaaat

SEQ ID NO: 93 - DNA, 14 bp, Artificial sequence
  Synthetic oligonucleotide
tttatccattcaaa

SEQ ID NO: 94 - DNA, 14 bp, Artificial sequence
  Synthetic oligonucleotide
ctttatccattcaa

SEQ ID NO: 95 - DNA, 14 bp, Artificial sequence
  Synthetic oligonucleotide
tctttatccattca

SEQ ID NO: 96 - DNA, 14 bp, Artificial sequence
  Synthetic oligonucleotide
ctctttatccattc

SEQ ID NO: 97 - DNA, 14 bp, Artificial sequence
  Synthetic oligonucleotide
tctctttatccatt

SEQ ID NO: 98 - DNA, 14 bp, Artificial sequence
  Synthetic oligonucleotide
ccatatatatctca

SEQ ID NO: 99 - DNA, 14 bp, Artificial sequence
  Synthetic oligonucleotide
accatatatatctc

SEQ ID NO: 100 - DNA, 14 bp, Artificial sequence
  Synthetic oligonucleotide
caccatatatatct

SEQ ID NO: 101 - DNA, 14 bp, Artificial sequence
  Synthetic oligonucleotide
gcaccatatatatc

SEQ ID NO: 102 - DNA, 14 bp, Artificial sequence
  Synthetic oligonucleotide
agcaccatatatat

SEQ ID NO: 103 - DNA, 14 bp, Artificial sequence
  Synthetic oligonucleotide
cagcaccatatata

SEQ ID NO: 104 - DNA, 14 bp, Artificial sequence
  Synthetic oligonucleotide
acagcaccatatat

SEQ ID NO: 105 - DNA, 14 bp, Artificial sequence
  Synthetic oligonucleotide
aacagcaccatata

SEQ ID NO: 106 - DNA, 14 bp, Artificial sequence
  Synthetic oligonucleotide
aaaacaaacaacaa

SEQ ID NO: 107 - DNA, 14 bp, Artificial sequence
  Synthetic oligonucleotide
taaaacaaacaaca

SEQ ID NO: 108 - DNA, 14 bp, Artificial sequence
  Synthetic oligonucleotide
ctaaaacaaacaac

SEQ ID NO: 109 - DNA, 14 bp, Artificial sequence
  Synthetic oligonucleotide
actaaaacaaacaa

SEQ ID NO: 110 - DNA, 14 bp, Artificial sequence
  Synthetic oligonucleotide
aactaaaacaaaca

SEQ ID NO: 111 - DNA, 14 bp, Artificial sequence
  Synthetic oligonucleotide
gaactaaaacaaac

SEQ ID NO: 112 - DNA, 14 bp, Artificial sequence
  Synthetic oligonucleotide
agaactaaaacaaa

SEQ ID NO: 113 - DNA, 14 bp, Artificial sequence
  Synthetic oligonucleotide
cagaactaaaacaa

SEQ ID NO: 114 - DNA, 14 bp, Artificial sequence
  Synthetic oligonucleotide
ccagaactaaaaca

SEQ ID NO: 115 - DNA, 14 bp, Artificial sequence
  Synthetic oligonucleotide
accagaactaaaac

SEQ ID NO: 116 - DNA, 14 bp, Artificial sequence
  Synthetic oligonucleotide
atgttattatcccc

SEQ ID NO: 117 - DNA, 14 bp, Artificial sequence
  Synthetic oligonucleotide
tatgttattatccc

SEQ ID NO: 118 - DNA, 14 bp, Artificial sequence
  Synthetic oligonucleotide
ctatgttattatcc

SEQ ID NO: 119 - DNA, 14 bp, Artificial sequence
  Synthetic oligonucleotide
tctatgttattatc

SEQ ID NO: 120 - DNA, 14 bp, Artificial sequence
  Synthetic oligonucleotide
tacactctaactct

SEQ ID NO: 121 - DNA, 14 bp, Artificial sequence
  Synthetic oligonucleotide
ctacactctaactc

SEQ ID NO: 122 - DNA, 14 bp, Artificial sequence
  Synthetic oligonucleotide
tctacactctaact

SEQ ID NO: 123 - DNA, 14 bp, Artificial sequence
  Synthetic oligonucleotide
ctctacactctaac

SEQ ID NO: 124 - DNA, 14 bp, Artificial sequence
  Synthetic oligonucleotide
tctctacactctaa

SEQ ID NO: 125 - DNA, 14 bp, Artificial sequence
  Synthetic oligonucleotide
ttctctacactcta

SEQ ID NO: 126 - DNA, 14 bp, Artificial sequence
  Synthetic oligonucleotide
cttctctacactct

SEQ ID NO: 127 - DNA, 14 bp, Artificial sequence
  Synthetic oligonucleotide
ccttctctacactc

SEQ ID NO: 128 - DNA, 14 bp, Artificial sequence
  Synthetic oligonucleotide
tacaacacaaatca

SEQ ID NO: 129 - DNA, 14 bp, Artificial sequence
  Synthetic oligonucleotide
ctacaacacaaatc

SEQ ID NO: 130 - DNA, 14 bp, Artificial sequence
  Synthetic oligonucleotide
actacaacacaaat

SEQ ID NO: 131 - DNA, 14 bp, Artificial sequence
  Synthetic oligonucleotide
aactacaacacaaa

SEQ ID NO: 132 - DNA, 14 bp, Artificial sequence
  Synthetic oligonucleotide
taactacaacacaa

SEQ ID NO: 133 - DNA, 14 bp, Artificial sequence
  Synthetic oligonucleotide
ctaactacaacaca

SEQ ID NO: 134 - DNA, 14 bp, Artificial sequence
  Synthetic oligonucleotide
actaactacaacac

SEQ ID NO: 135 - DNA, 14 bp, Artificial sequence
  Synthetic oligonucleotide
tactaactacaaca

SEQ ID NO: 136 - DNA, 14 bp, Artificial sequence
  Synthetic oligonucleotide
ctactaactacaac

SEQ ID NO: 137 - DNA, 14 bp, Artificial sequence
  Synthetic oligonucleotide
actactaactacaa

SEQ ID NO: 138 - DNA, 14 bp, Artificial sequence
  Synthetic oligonucleotide
cactactaactaca

SEQ ID NO: 139 - DNA, 14 bp, Artificial sequence
  Synthetic oligonucleotide
acactactaactac

SEQ ID NO: 140 - DNA, 14 bp, Artificial sequence
  Synthetic oligonucleotide
gacactactaacta

SEQ ID NO: 141 - DNA, 14 bp, Artificial sequence
  Synthetic oligonucleotide
agacactactaact

SEQ ID NO: 142 - DNA, 14 bp, Artificial sequence
  Synthetic oligonucleotide
tttacccccaacct

SEQ ID NO: 143 - DNA, 14 bp, Artificial sequence
  Synthetic oligonucleotide
atttacccccaacc

SEQ ID NO: 144 - DNA, 14 bp, Artificial sequence
  Synthetic oligonucleotide
catttacccccaac

SEQ ID NO: 145 - DNA, 14 bp, Artificial sequence
  Synthetic oligonucleotide
tcatttacccccaa

SEQ ID NO: 146 - DNA, 14 bp, Artificial sequence
  Synthetic oligonucleotide
atcatttaccccca

SEQ ID NO: 147 - DNA, 14 bp, Artificial sequence
  Synthetic oligonucleotide
aatcatttaccccc

SEQ ID NO: 148 - DNA, 14 bp, Artificial sequence
  Synthetic oligonucleotide
aaatcatttacccc

SEQ ID NO: 149 - DNA, 14 bp, Artificial sequence
  Synthetic oligonucleotide
caaatcatttaccc

SEQ ID NO: 150 - DNA, 14 bp, Artificial sequence
  Synthetic oligonucleotide
ccaaatcatttacc

SEQ ID NO: 151 - DNA, 14 bp, Artificial sequence
  Synthetic oligonucleotide
accaaatcatttac

SEQ ID NO: 152 - DNA, 14 bp, Artificial sequence
  Synthetic oligonucleotide
taccaaatcattta

SEQ ID NO: 153 - DNA, 14 bp, Artificial sequence
  Synthetic oligonucleotide
ctaccaaatcattt

SEQ ID NO: 154 - DNA, 14 bp, Artificial sequence
  Synthetic oligonucleotide
gctaccaaatcatt

SEQ ID NO: 155 - DNA, 14 bp, Artificial sequence
  Synthetic oligonucleotide
tgctaccaaatcat

SEQ ID NO: 156 - DNA, 14 bp, Artificial sequence
  Synthetic oligonucleotide
ctgctaccaaatca

SEQ ID NO: 157 - DNA, 14 bp, Artificial sequence
  Synthetic oligonucleotide
actgctaccaaatc

SEQ ID NO: 158 - DNA, 14 bp, Artificial sequence
  Synthetic oligonucleotide
aactgctaccaaat

SEQ ID NO: 159 - DNA, 14 bp, Artificial sequence
  Synthetic oligonucleotide
aagctttaatcaaa

SEQ ID NO: 160 - DNA, 14 bp, Artificial sequence
  Synthetic oligonucleotide
caagctttaatcaa

SEQ ID NO: 161 - DNA, 14 bp, Artificial sequence
  Synthetic oligonucleotide
tcaagctttaatca

SEQ ID NO: 162 - DNA, 14 bp, Artificial sequence
  Synthetic oligonucleotide
atcaagctttaatc

SEQ ID NO: 163 - DNA, 14 bp, Artificial sequence
  Synthetic oligonucleotide
catcaagctttaat

SEQ ID NO: 164 - DNA, 14 bp, Artificial sequence
  Synthetic oligonucleotide
tcaaactatcccca

SEQ ID NO: 165 - DNA, 14 bp, Artificial sequence
  Synthetic oligonucleotide
ctcaaactatcccc

SEQ ID NO: 166 - DNA, 14 bp, Artificial sequence
  Synthetic oligonucleotide
tctcaaactatccc

SEQ ID NO: 167 - DNA, 14 bp, Artificial sequence
  Synthetic oligonucleotide
atctcaaactatcc

SEQ ID NO: 168 - DNA, 14 bp, Artificial sequence
  Synthetic oligonucleotide
tatctcaaactatc

SEQ ID NO: 169 - DNA, 14 bp, Artificial sequence
  Synthetic oligonucleotide
ttatctcaaactat

SEQ ID NO: 170 - DNA, 14 bp, Artificial sequence
  Synthetic oligonucleotide
cttatctcaaacta

SEQ ID NO: 171 - DNA, 14 bp, Artificial sequence
  Synthetic oligonucleotide
ccttatctcaaact

SEQ ID NO: 172 - DNA, 14 bp, Artificial sequence
  Synthetic oligonucleotide
cccttatctcaaac

SEQ ID NO: 173 - DNA, 14 bp, Artificial sequence
  Synthetic oligonucleotide
gcccttatctcaaa

SEQ ID NO: 174 - DNA, 14 bp, Artificial sequence
  Synthetic oligonucleotide
tgcccttatctcaa

SEQ ID NO: 175 - DNA, 14 bp, Artificial sequence
  Synthetic oligonucleotide
caaacttcatcaaa

SEQ ID NO: 176 - DNA, 14 bp, Artificial sequence
  Synthetic oligonucleotide
tcaaacttcatcaa

SEQ ID NO: 177 - DNA, 14 bp, Artificial sequence
  Synthetic oligonucleotide
atcaaacttcatca

SEQ ID NO: 178 - DNA, 14 bp, Artificial sequence
  Synthetic oligonucleotide
aatcaaacttcatc

SEQ ID NO: 179 - DNA, 14 bp, Artificial sequence
  Synthetic oligonucleotide
aaatcaaacttcat

SEQ ID NO: 180 - DNA, 14 bp, Artificial sequence
  Synthetic oligonucleotide
gaaatcaaacttca

SEQ ID NO: 181 - DNA, 14 bp, Artificial sequence
  Synthetic oligonucleotide
tgaaatcaaacttc

SEQ ID NO: 182 - DNA, 14 bp, Artificial sequence
  Synthetic oligonucleotide
ttgaaatcaaactt

SEQ ID NO: 183 - DNA, 14 bp, Artificial sequence
  Synthetic oligonucleotide
aacacaaatttcct

SEQ ID NO: 184 - DNA, 14 bp, Artificial sequence
  Synthetic oligonucleotide
taacacaaatttcc

SEQ ID NO: 185 - DNA, 14 bp, Artificial sequence
  Synthetic oligonucleotide
ctaacacaaatttc

SEQ ID NO: 186 - DNA, 14 bp, Artificial sequence
  Synthetic oligonucleotide
gctaacacaaattt

SEQ ID NO: 187 - DNA, 14 bp, Artificial sequence
  Synthetic oligonucleotide
tgctaacacaaatt

SEQ ID NO: 188 - DNA, 14 bp, Artificial sequence
  Synthetic oligonucleotide
ttgctaacacaaat

SEQ ID NO: 189 - DNA, 14 bp, Artificial sequence
  Synthetic oligonucleotide
tttgctaacacaaa

SEQ ID NO: 190 - DNA, 14 bp, Artificial sequence
  Synthetic oligonucleotide
ctttgctaacacaa

SEQ ID NO: 191 - DNA, 14 bp, Artificial sequence
  Synthetic oligonucleotide
cctttgctaacaca

SEQ ID NO: 192 - DNA, 14 bp, Artificial sequence
  Synthetic oligonucleotide
taactaataattat

SEQ ID NO: 193 - DNA, 14 bp, Artificial sequence
  Synthetic oligonucleotide
ataactaataatta

SEQ ID NO: 194 - DNA, 14 bp, Artificial sequence
  Synthetic oligonucleotide
aataactaataatt

SEQ ID NO: 195 - DNA, 14 bp, Artificial sequence
  Synthetic oligonucleotide
taataactaataat

SEQ ID NO: 196 - DNA, 14 bp, Artificial sequence
  Synthetic oligonucleotide
ataataactaataa

SEQ ID NO: 197 - DNA, 14 bp, Artificial sequence
  Synthetic oligonucleotide
aataataactaata

SEQ ID NO: 198 - DNA, 14 bp, Artificial sequence
  Synthetic oligonucleotide
caataataactaat

SEQ ID NO: 199 - DNA, 14 bp, Artificial sequence
  Synthetic oligonucleotide
ccaataataactaa

SEQ ID NO: 200 - DNA, 14 bp, Artificial sequence
  Synthetic oligonucleotide
accaataataacta

SEQ ID NO: 201 - DNA, 14 bp, Artificial sequence
  Synthetic oligonucleotide
aaccaataataact

SEQ ID NO: 202 - DNA, 14 bp, Artificial sequence
  Synthetic oligonucleotide
taaccaataataac

SEQ ID NO: 203 - DNA, 14 bp, Artificial sequence
  Synthetic oligonucleotide
ataaccaataataa

SEQ ID NO: 204 - DNA, 14 bp, Artificial sequence
  Synthetic oligonucleotide
tataaccaataata

SEQ ID NO: 205 - DNA, 14 bp, Artificial sequence
  Synthetic oligonucleotide
gtataaccaataat

SEQ ID NO: 206 - DNA, 14 bp, Artificial sequence
  Synthetic oligonucleotide
acatcacacaattt

SEQ ID NO: 207 - DNA, 14 bp, Artificial sequence
  Synthetic oligonucleotide
gacatcacacaatt

SEQ ID NO: 208 - DNA, 14 bp, Artificial sequence
  Synthetic oligonucleotide
tgacatcacacaat

SEQ ID NO: 209 - DNA, 14 bp, Artificial sequence
  Synthetic oligonucleotide
ctgacatcacacaa

SEQ ID NO: 210 - DNA, 14 bp, Artificial sequence
  Synthetic oligonucleotide
tctgacatcacaca

SEQ ID NO: 211 - DNA, 14 bp, Artificial sequence
  Synthetic oligonucleotide
atctgacatcacac

SEQ ID NO: 212 - DNA, 14 bp, Artificial sequence
  Synthetic oligonucleotide
ttccttaacccaac

SEQ ID NO: 213 - DNA, 14 bp, Artificial sequence
  Synthetic oligonucleotide
attccttaacccaa

SEQ ID NO: 214 - DNA, 14 bp, Artificial sequence
  Synthetic oligonucleotide
tattccttaaccca

SEQ ID NO: 215 - DNA, 14 bp, Artificial sequence
  Synthetic oligonucleotide
ctattccttaaccc

SEQ ID NO: 216 - DNA, 14 bp, Artificial sequence
  Synthetic oligonucleotide
tctattccttaacc

SEQ ID NO: 217 - DNA, 14 bp, Artificial sequence
  Synthetic oligonucleotide
gtctattccttaac

SEQ ID NO: 218 - DNA, 14 bp, Artificial sequence
  Synthetic oligonucleotide
catcaaatctcata

SEQ ID NO: 219 - DNA, 14 bp, Artificial sequence
  Synthetic oligonucleotide
gcatcaaatctcat

SEQ ID NO: 220 - DNA, 14 bp, Artificial sequence
  Synthetic oligonucleotide
tgcatcaaatctca

SEQ ID NO: 221 - DNA, 14 bp, Artificial sequence
  Synthetic oligonucleotide
atgcatcaaatctc

SEQ ID NO: 222 - DNA, 14 bp, Artificial sequence
  Synthetic oligonucleotide
aatgcatcaaatct

SEQ ID NO: 223 - DNA, 14 bp, Artificial sequence
  Synthetic oligonucleotide
attttaaacaaaca

SEQ ID NO: 224 - DNA, 14 bp, Artificial sequence
  Synthetic oligonucleotide
tattttaaacaaac

SEQ ID NO: 225 - DNA, 14 bp, Artificial sequence
  Synthetic oligonucleotide
ttattttaaacaaa

SEQ ID NO: 226 - DNA, 14 bp, Artificial sequence
  Synthetic oligonucleotide
attattttaaacaa

SEQ ID NO: 227 - DNA, 14 bp, Artificial sequence
  Synthetic oligonucleotide
aattattttaaaca

SEQ ID NO: 228 - DNA, 14 bp, Artificial sequence
  Synthetic oligonucleotide
gaattattttaaac

SEQ ID NO: 229 - DNA, 14 bp, Artificial sequence
  Synthetic oligonucleotide
ttttacaaatctac

SEQ ID NO: 230 - DNA, 14 bp, Artificial sequence
  Synthetic oligonucleotide
attttacaaatcta

SEQ ID NO: 231 - DNA, 14 bp, Artificial sequence
  Synthetic oligonucleotide
tattttacaaatct

SEQ ID NO: 232 - DNA, 14 bp, Artificial sequence
  Synthetic oligonucleotide
ttattttacaaatc

SEQ ID NO: 233 - DNA, 14 bp, Artificial sequence
  Synthetic oligonucleotide
tttattttacaaat

SEQ ID NO: 234 - DNA, 14 bp, Artificial sequence
  Synthetic oligonucleotide
atttattttacaaa

SEQ ID NO: 235 - DNA, 14 bp, Artificial sequence
  Synthetic oligonucleotide
catttattttacaa

SEQ ID NO: 236 - DNA, 14 bp, Artificial sequence
  Synthetic oligonucleotide
acatttattttaca

SEQ ID NO: 237 - DNA, 14 bp, Artificial sequence
  Synthetic oligonucleotide
aacatttattttac

SEQ ID NO: 238 - DNA, 14 bp, Artificial sequence
  Synthetic oligonucleotide
taacatttatttta

SEQ ID NO: 239 - DNA, 14 bp, Artificial sequence
  Synthetic oligonucleotide
aatttaatcattaa

SEQ ID NO: 240 - DNA, 14 bp, Artificial sequence
  Synthetic oligonucleotide
taatttaatcatta

SEQ ID NO: 241 - DNA, 14 bp, Artificial sequence
  Synthetic oligonucleotide
ataatttaatcatt

SEQ ID NO: 242 - DNA, 14 bp, Artificial sequence
  Synthetic oligonucleotide
aataatttaatcat

SEQ ID NO: 243 - DNA, 14 bp, Artificial sequence
  Synthetic oligonucleotide
aaataatttaatca

SEQ ID NO: 244 - DNA, 14 bp, Artificial sequence
  Synthetic oligonucleotide
taaataatttaatc

SEQ ID NO: 245 - DNA, 14 bp, Artificial sequence
  Synthetic oligonucleotide
ctaaataatttaat

SEQ ID NO: 246 - DNA, 14 bp, Artificial sequence
  Synthetic oligonucleotide
cctaaataatttaa

SEQ ID NO: 247 - DNA, 14 bp, Artificial sequence
  Synthetic oligonucleotide
ccctaaataattta

SEQ ID NO: 248 - DNA, 14 bp, Artificial sequence
  Synthetic oligonucleotide
cccctaaataattt

SEQ ID NO: 249 - DNA, 14 bp, Artificial sequence
  Synthetic oligonucleotide
tcccctaaataatt

SEQ ID NO: 250 - DNA, 14 bp, Artificial sequence
  Synthetic oligonucleotide
tatataaaaatcta

SEQ ID NO: 251 - DNA, 14 bp, Artificial sequence
  Synthetic oligonucleotide
ctatataaaaatct

SEQ ID NO: 252 - DNA, 14 bp, Artificial sequence
  Synthetic oligonucleotide
tctatataaaaatc

SEQ ID NO: 253 - DNA, 14 bp, Artificial sequence
  Synthetic oligonucleotide
atctatataaaaat

SEQ ID NO: 254 - DNA, 14 bp, Artificial sequence
  Synthetic oligonucleotide
tatctatataaaaa

SEQ ID NO: 255 - DNA, 14 bp, Artificial sequence
  Synthetic oligonucleotide
ttatctatataaaa

SEQ ID NO: 256 - DNA, 14 bp, Artificial sequence
  Synthetic oligonucleotide
tttatctatataaa

SEQ ID NO: 257 - DNA, 14 bp, Artificial sequence
  Synthetic oligonucleotide
ccccactctaatat

SEQ ID NO: 258 - DNA, 14 bp, Artificial sequence
  Synthetic oligonucleotide
gccccactctaata

SEQ ID NO: 259 - DNA, 14 bp, Artificial sequence
  Synthetic oligonucleotide
tgccccactctaat

SEQ ID NO: 260 - DNA, 14 bp, Artificial sequence
  Synthetic oligonucleotide
atgccccactctaa

SEQ ID NO: 261 - DNA, 14 bp, Artificial sequence
  Synthetic oligonucleotide
aatgccccactcta

SEQ ID NO: 262 - DNA, 14 bp, Artificial sequence
  Synthetic oligonucleotide
aaatgccccactct

SEQ ID NO: 263 - DNA, 14 bp, Artificial sequence
  Synthetic oligonucleotide
taaatgccccactc

SEQ ID NO: 264 - DNA, 14 bp, Artificial sequence
  Synthetic oligonucleotide
ttaaatgccccact

SEQ ID NO: 265 - DNA, 14 bp, Artificial sequence
  Synthetic oligonucleotide
atataaccaccaaa

SEQ ID NO: 266 - DNA, 14 bp, Artificial sequence
  Synthetic oligonucleotide
tatataaccaccaa

SEQ ID NO: 267 - DNA, 14 bp, Artificial sequence
  Synthetic oligonucleotide
atatataaccacca

SEQ ID NO: 268 - DNA, 14 bp, Artificial sequence
  Synthetic oligonucleotide
tatatataaccacc

SEQ ID NO: 269 - DNA, 14 bp, Artificial sequence
  Synthetic oligonucleotide
atatatataaccac

SEQ ID NO: 270 - DNA, 14 bp, Artificial sequence
  Synthetic oligonucleotide
aaaattcactatct

SEQ ID NO: 271 - DNA, 14 bp, Artificial sequence
  Synthetic oligonucleotide
gaaaattcactatc

SEQ ID NO: 272 - DNA, 14 bp, Artificial sequence
  Synthetic oligonucleotide
tgaaaattcactat

SEQ ID NO: 273 - DNA, 14 bp, Artificial sequence
  Synthetic oligonucleotide
ctgaaaattcacta

SEQ ID NO: 274 - DNA, 14 bp, Artificial sequence
  Synthetic oligonucleotide
tctgaaaattcact

SEQ ID NO: 275 - DNA, 14 bp, Artificial sequence
  Synthetic oligonucleotide
tactatatacatct

SEQ ID NO: 276 - DNA, 14 bp, Artificial sequence
  Synthetic oligonucleotide
ctactatatacatc

SEQ ID NO: 277 - DNA, 14 bp, Artificial sequence
  Synthetic oligonucleotide
tctactatatacat

SEQ ID NO: 278 - DNA, 14 bp, Artificial sequence
  Synthetic oligonucleotide
gtctactatataca

SEQ ID NO: 279 - DNA, 14 bp, Artificial sequence
  Synthetic oligonucleotide
agtctactatatac

SEQ ID NO: 280 - DNA, 14 bp, Artificial sequence
  Synthetic oligonucleotide
tagtctactatata

SEQ ID NO: 281 - DNA, 14 bp, Artificial sequence
  Synthetic oligonucleotide
ctagtctactatat

SEQ ID NO: 282 - DNA, 14 bp, Artificial sequence
  Synthetic oligonucleotide
actagtctactata

SEQ ID NO: 283 - DNA, 14 bp, Artificial sequence
  Synthetic oligonucleotide
aactagtctactat

SEQ ID NO: 284 - DNA, 14 bp, Artificial sequence
  Synthetic oligonucleotide
tattctacccataa

SEQ ID NO: 285 - DNA, 14 bp, Artificial sequence
  Synthetic oligonucleotide
atattctacccata

SEQ ID NO: 286 - DNA, 14 bp, Artificial sequence
  Synthetic oligonucleotide
tatattctacccat

SEQ ID NO: 287 - DNA, 14 bp, Artificial sequence
  Synthetic oligonucleotide
gtatattctaccca

SEQ ID NO: 288 - DNA, 14 bp, Artificial sequence
  Synthetic oligonucleotide
tgtatattctaccc

SEQ ID NO: 289 - DNA, 14 bp, Artificial sequence
  Synthetic oligonucleotide
atgtatattctacc

SEQ ID NO: 290 - DNA, 14 bp, Artificial sequence
  Synthetic oligonucleotide
ccacacaattccta

SEQ ID NO: 291 - DNA, 14 bp, Artificial sequence
  Synthetic oligonucleotide
accacacaattcct

SEQ ID NO: 292 - DNA, 14 bp, Artificial sequence
  Synthetic oligonucleotide
aaccacacaattcc

SEQ ID NO: 293 - DNA, 14 bp, Artificial sequence
  Synthetic oligonucleotide
aaaccacacaattc

SEQ ID NO: 294 - DNA, 14 bp, Artificial sequence
  Synthetic oligonucleotide
aaaaccacacaatt

SEQ ID NO: 295 - DNA, 14 bp, Artificial sequence
  Synthetic oligonucleotide
gaaaaccacacaat

SEQ ID NO: 296 - DNA, 14 bp, Artificial sequence
  Synthetic oligonucleotide
agaaaaccacacaa

SEQ ID NO: 297 - DNA, 14 bp, Artificial sequence
  Synthetic oligonucleotide
cagaaaaccacaca

SEQ ID NO: 298 - DNA, 14 bp, Artificial sequence
  Synthetic oligonucleotide
ccagaaaaccacac

SEQ ID NO: 299 - DNA, 14 bp, Artificial sequence
  Synthetic oligonucleotide
tccagaaaaccaca

SEQ ID NO: 300 - DNA, 14 bp, Artificial sequence
  Synthetic oligonucleotide
aaatccataaaaaa

SEQ ID NO: 301 - DNA, 14 bp, Artificial sequence
  Synthetic oligonucleotide
taaatccataaaaa

SEQ ID NO: 302 - DNA, 14 bp, Artificial sequence
  Synthetic oligonucleotide
ctaaatccataaaa

SEQ ID NO: 303 - DNA, 14 bp, Artificial sequence
  Synthetic oligonucleotide
actaaatccataaa

SEQ ID NO: 304 - DNA, 14 bp, Artificial sequence
  Synthetic oligonucleotide
cactaaatccataa

SEQ ID NO: 305 - DNA, 14 bp, Artificial sequence
  Synthetic oligonucleotide
tcactaaatccata

SEQ ID NO: 306 - DNA, 14 bp, Artificial sequence
  Synthetic oligonucleotide
atcactaaatccat

SEQ ID NO: 307 - DNA, 14 bp, Artificial sequence
  Synthetic oligonucleotide
tatcactaaatcca

SEQ ID NO: 308 - DNA, 14 bp, Artificial sequence
  Synthetic oligonucleotide
atatcactaaatcc

SEQ ID NO: 309 - DNA, 14 bp, Artificial sequence
  Synthetic oligonucleotide
tatatcactaaatc

SEQ ID NO: 310 - DNA, 14 bp, Artificial sequence
  Synthetic oligonucleotide
atatatcactaaat

SEQ ID NO: 311 - DNA, 14 bp, Artificial sequence
  Synthetic oligonucleotide
gatatatcactaaa

SEQ ID NO: 312 - DNA, 14 bp, Artificial sequence
  Synthetic oligonucleotide
agatatatcactaa

SEQ ID NO: 313 - DNA, 14 bp, Artificial sequence
  Synthetic oligonucleotide
tagatatatcacta

SEQ ID NO: 314 - DNA, 14 bp, Artificial sequence
  Synthetic oligonucleotide
tataaatttctcta

SEQ ID NO: 315 - DNA, 14 bp, Artificial sequence
  Synthetic oligonucleotide
atataaatttctct

SEQ ID NO: 316 - DNA, 14 bp, Artificial sequence
  Synthetic oligonucleotide
tatataaatttctc

SEQ ID NO: 317 - DNA, 14 bp, Artificial sequence
  Synthetic oligonucleotide
atatataaatttct

SEQ ID NO: 318 - DNA, 14 bp, Artificial sequence
  Synthetic oligonucleotide
catatataaatttc

SEQ ID NO: 319 - DNA, 14 bp, Artificial sequence
  Synthetic oligonucleotide
tcatatataaattt

SEQ ID NO: 320 - DNA, 14 bp, Artificial sequence
  Synthetic oligonucleotide
ctccattccaaatt

SEQ ID NO: 321 - DNA, 14 bp, Artificial sequence
  Synthetic oligonucleotide
actccattccaaat

SEQ ID NO: 322 - DNA, 14 bp, Artificial sequence
  Synthetic oligonucleotide
cactccattccaaa

SEQ ID NO: 323 - DNA, 14 bp, Artificial sequence
  Synthetic oligonucleotide
ccactccattccaa

SEQ ID NO: 324 - DNA, 14 bp, Artificial sequence
  Synthetic oligonucleotide
accactccattcca

SEQ ID NO: 325 - DNA, 14 bp, Artificial sequence
  Synthetic oligonucleotide
aaccactccattcc

SEQ ID NO: 326 - DNA, 14 bp, Artificial sequence
  Synthetic oligonucleotide
aaaccactccattc

SEQ ID NO: 327 - DNA, 14 bp, Artificial sequence
  Synthetic oligonucleotide
tcacacaaccatat

SEQ ID NO: 328 - DNA, 14 bp, Artificial sequence
  Synthetic oligonucleotide
atcacacaaccata

SEQ ID NO: 329 - DNA, 14 bp, Artificial sequence
  Synthetic oligonucleotide
gatcacacaaccat

SEQ ID NO: 330 - DNA, 14 bp, Artificial sequence
  Synthetic oligonucleotide
agatcacacaacca

SEQ ID NO: 331 - DNA, 14 bp, Artificial sequence
  Synthetic oligonucleotide
aagatcacacaacc

SEQ ID NO: 332 - DNA, 14 bp, Artificial sequence
  Synthetic oligonucleotide
aaagatcacacaac

SEQ ID NO: 333 - DNA, 14 bp, Artificial sequence
  Synthetic oligonucleotide
aaaagatcacacaa

SEQ ID NO: 334 - DNA, 14 bp, Artificial sequence
  Synthetic oligonucleotide
taaaagatcacaca

SEQ ID NO: 335 - DNA, 14 bp, Artificial sequence
  Synthetic oligonucleotide
ttcatttctaaaaa

SEQ ID NO: 336 - DNA, 14 bp, Artificial sequence
  Synthetic oligonucleotide
tttcatttctaaaa

SEQ ID NO: 337 - DNA, 14 bp, Artificial sequence
  Synthetic oligonucleotide
ctttcatttctaaa

SEQ ID NO: 338 - DNA, 14 bp, Artificial sequence
  Synthetic oligonucleotide
tctttcatttctaa

SEQ ID NO: 339 - DNA, 14 bp, Artificial sequence
  Synthetic oligonucleotide
atctttcatttcta

SEQ ID NO: 340 - DNA, 14 bp, Artificial sequence
  Synthetic oligonucleotide
gatctttcatttct

SEQ ID NO: 341 - DNA, 14 bp, Artificial sequence
  Synthetic oligonucleotide
tgatctttcatttc

SEQ ID NO: 342 - DNA, 14 bp, Artificial sequence
  Synthetic oligonucleotide
atgatctttcattt

SEQ ID NO: 343 - DNA, 14 bp, Artificial sequence
  Synthetic oligonucleotide
ataaaaacccactt

SEQ ID NO: 344 - DNA, 14 bp, Artificial sequence
  Synthetic oligonucleotide
cataaaaacccact

SEQ ID NO: 345 - DNA, 14 bp, Artificial sequence
  Synthetic oligonucleotide
acataaaaacccac

SEQ ID NO: 346 - DNA, 14 bp, Artificial sequence
  Synthetic oligonucleotide
cacataaaaaccca

SEQ ID NO: 347 - DNA, 14 bp, Artificial sequence
  Synthetic oligonucleotide
tcacataaaaaccc

SEQ ID NO: 348 - DNA, 14 bp, Artificial sequence
  Synthetic oligonucleotide
atcacataaaaacc

SEQ ID NO: 349 - DNA, 14 bp, Artificial sequence
  Synthetic oligonucleotide
catcacataaaaac

SEQ ID NO: 350 - DNA, 14 bp, Artificial sequence
  Synthetic oligonucleotide
tcatcacataaaaa

SEQ ID NO: 351 - DNA, 14 bp, Artificial sequence
  Synthetic oligonucleotide
gtcatcacataaaa

SEQ ID NO: 352 - DNA, 14 bp, Artificial sequence
  Synthetic oligonucleotide
agtcatcacataaa

SEQ ID NO: 353 - DNA, 14 bp, Artificial sequence
  Synthetic oligonucleotide
tagtcatcacataa

SEQ ID NO: 354 - DNA, 14 bp, Artificial sequence
  Synthetic oligonucleotide
atagtcatcacata

SEQ ID NO: 355 - DNA, 14 bp, Artificial sequence
  Synthetic oligonucleotide
catagtcatcacat

SEQ ID NO: 356 - DNA, 14 bp, Artificial sequence
  Synthetic oligonucleotide
taaatacaaatcta

SEQ ID NO: 357 - DNA, 14 bp, Artificial sequence
  Synthetic oligonucleotide
ctaaatacaaatct

SEQ ID NO: 358 - DNA, 14 bp, Artificial sequence
  Synthetic oligonucleotide
gctaaatacaaatc

SEQ ID NO: 359 - DNA, 14 bp, Artificial sequence
  Synthetic oligonucleotide
tgctaaatacaaat

SEQ ID NO: 360 - DNA, 14 bp, Artificial sequence
  Synthetic oligonucleotide
atgctaaatacaaa

SEQ ID NO: 361 - DNA, 14 bp, Artificial sequence
  Synthetic oligonucleotide
tatgctaaatacaa

SEQ ID NO: 362 - DNA, 14 bp, Artificial sequence
  Synthetic oligonucleotide
aatcttacactaaa

SEQ ID NO: 363 - DNA, 14 bp, Artificial sequence
  Synthetic oligonucleotide
taatcttacactaa

SEQ ID NO: 364 - DNA, 14 bp, Artificial sequence
  Synthetic oligonucleotide
ataatcttacacta

SEQ ID NO: 365 - DNA, 14 bp, Artificial sequence
  Synthetic oligonucleotide
aataatcttacact

SEQ ID NO: 366 - DNA, 14 bp, Artificial sequence
  Synthetic oligonucleotide
gaataatcttacac

SEQ ID NO: 367 - DNA, 14 bp, Artificial sequence
  Synthetic oligonucleotide
tgaataatcttaca

SEQ ID NO: 368 - DNA, 14 bp, Artificial sequence
  Synthetic oligonucleotide
atgaataatcttac

SEQ ID NO: 369 - DNA, 14 bp, Artificial sequence
  Synthetic oligonucleotide
caaaattctaataa

SEQ ID NO: 370 - DNA, 14 bp, Artificial sequence
  Synthetic oligonucleotide
tcaaaattctaata

SEQ ID NO: 371 - DNA, 14 bp, Artificial sequence
  Synthetic oligonucleotide
ttcaaaattctaat

SEQ ID NO: 372 - DNA, 14 bp, Artificial sequence
  Synthetic oligonucleotide
attcaaaattctaa

SEQ ID NO: 373 - DNA, 14 bp, Artificial sequence
  Synthetic oligonucleotide
gattcaaaattcta

SEQ ID NO: 374 - DNA, 14 bp, Artificial sequence
  Synthetic oligonucleotide
agattcaaaattct

SEQ ID NO: 375 - DNA, 14 bp, Artificial sequence
  Synthetic oligonucleotide
attactacaaccaa

SEQ ID NO: 376 - DNA, 14 bp, Artificial sequence
  Synthetic oligonucleotide
cattactacaacca

SEQ ID NO: 377 - DNA, 14 bp, Artificial sequence
  Synthetic oligonucleotide
ccattactacaacc

SEQ ID NO: 378 - DNA, 14 bp, Artificial sequence
  Synthetic oligonucleotide
accattactacaac

SEQ ID NO: 379 - DNA, 14 bp, Artificial sequence
  Synthetic oligonucleotide
aaccattactacaa

SEQ ID NO: 380 - DNA, 14 bp, Artificial sequence
  Synthetic oligonucleotide
aaaccattactaca

SEQ ID NO: 381 - DNA, 14 bp, Artificial sequence
  Synthetic oligonucleotide
gaaaccattactac

SEQ ID NO: 382 - DNA, 14 bp, Artificial sequence
  Synthetic oligonucleotide
tgaaaccattacta

SEQ ID NO: 383 - DNA, 14 bp, Artificial sequence
  Synthetic oligonucleotide
atgaaaccattact

SEQ ID NO: 384 - DNA, 14 bp, Artificial sequence
  Synthetic oligonucleotide
atttttaaaaacac

SEQ ID NO: 385 - DNA, 14 bp, Artificial sequence
  Synthetic oligonucleotide
aatttttaaaaaca

SEQ ID NO: 386 - DNA, 14 bp, Artificial sequence
  Synthetic oligonucleotide
taatttttaaaaac

SEQ ID NO: 387 - DNA, 14 bp, Artificial sequence
  Synthetic oligonucleotide
ataatttttaaaaa

SEQ ID NO: 388 - DNA, 14 bp, Artificial sequence
  Synthetic oligonucleotide
cataatttttaaaa

SEQ ID NO: 389 - DNA, 14 bp, Artificial sequence
  Synthetic oligonucleotide
tcataatttttaaa

SEQ ID NO: 390 - DNA, 14 bp, Artificial sequence
  Synthetic oligonucleotide
atcataatttttaa

SEQ ID NO: 391 - DNA, 14 bp, Artificial sequence
  Synthetic oligonucleotide
ctttatacaaaaaa

SEQ ID NO: 392 - DNA, 14 bp, Artificial sequence
  Synthetic oligonucleotide
actttatacaaaaa

SEQ ID NO: 393 - DNA, 14 bp, Artificial sequence
  Synthetic oligonucleotide
tactttatacaaaa

SEQ ID NO: 394 - DNA, 14 bp, Artificial sequence
  Synthetic oligonucleotide
ttactttatacaaa

SEQ ID NO: 395 - DNA, 14 bp, Artificial sequence
  Synthetic oligonucleotide
cttactttatacaa

SEQ ID NO: 396 - DNA, 14 bp, Artificial sequence
  Synthetic oligonucleotide
gcttactttataca

SEQ ID NO: 397 - DNA, 14 bp, Artificial sequence
  Synthetic oligonucleotide
tgcttactttatac

SEQ ID NO: 398 - DNA, 14 bp, Artificial sequence
  Synthetic oligonucleotide
tctcaaaataataa

SEQ ID NO: 399 - DNA, 14 bp, Artificial sequence
  Synthetic oligonucleotide
ctctcaaaataata

SEQ ID NO: 400 - DNA, 14 bp, Artificial sequence
  Synthetic oligonucleotide
tctctcaaaataat

SEQ ID NO: 401 - DNA, 14 bp, Artificial sequence
  Synthetic oligonucleotide
atctctcaaaataa

SEQ ID NO: 402 - DNA, 14 bp, Artificial sequence
  Synthetic oligonucleotide
aatctctcaaaata

SEQ ID NO: 403 - DNA, 14 bp, Artificial sequence
  Synthetic oligonucleotide
aaatctctcaaaat

SEQ ID NO: 404 - DNA, 14 bp, Artificial sequence
  Synthetic oligonucleotide
taaatctctcaaaa

SEQ ID NO: 405 - DNA, 14 bp, Artificial sequence
  Synthetic oligonucleotide
ttaaatctctcaaa

SEQ ID NO: 406 - DNA, 14 bp, Artificial sequence
  Synthetic oligonucleotide
tttaaatctctcaa

SEQ ID NO: 407 - DNA, 14 bp, Artificial sequence
  Synthetic oligonucleotide
ttttaaatctctca

SEQ ID NO: 408 - DNA, 14 bp, Artificial sequence
  Synthetic oligonucleotide
taatactttttcca

SEQ ID NO: 409 - DNA, 14 bp, Artificial sequence
  Synthetic oligonucleotide
ttaatactttttcc

SEQ ID NO: 410 - DNA, 14 bp, Artificial sequence
  Synthetic oligonucleotide
gttaatactttttc

SEQ ID NO: 411 - DNA, 14 bp, Artificial sequence
  Synthetic oligonucleotide
tgttaatacttttt

SEQ ID NO: 412 - DNA, 14 bp, Artificial sequence
  Synthetic oligonucleotide
atgttaatactttt

SEQ ID NO: 413 - DNA, 14 bp, Artificial sequence
  Synthetic oligonucleotide
ttatcactaccaca

SEQ ID NO: 414 - DNA, 14 bp, Artificial sequence
  Synthetic oligonucleotide
tttatcactaccac

SEQ ID NO: 415 - DNA, 14 bp, Artificial sequence
  Synthetic oligonucleotide
atttatcactacca

SEQ ID NO: 416 - DNA, 14 bp, Artificial sequence
  Synthetic oligonucleotide
catttatcactacc

SEQ ID NO: 417 - DNA, 14 bp, Artificial sequence
  Synthetic oligonucleotide
tcatttatcactac

SEQ ID NO: 418 - DNA, 14 bp, Artificial sequence
  Synthetic oligonucleotide
atcatttatcacta

SEQ ID NO: 419 - DNA, 14 bp, Artificial sequence
  Synthetic oligonucleotide
catcatttatcact

SEQ ID NO: 420 - DNA, 14 bp, Artificial sequence
  Synthetic oligonucleotide
acatcatttatcac

SEQ ID NO: 421 - DNA, 14 bp, Artificial sequence
  Synthetic oligonucleotide
aacatcatttatca

SEQ ID NO: 422 - DNA, 14 bp, Artificial sequence
  Synthetic oligonucleotide
taacatcatttatc

SEQ ID NO: 423 - DNA, 14 bp, Artificial sequence
  Synthetic oligonucleotide
ttaacatcatttat

SEQ ID NO: 424 - DNA, 14 bp, Artificial sequence
  Synthetic oligonucleotide
attaacatcattta

SEQ ID NO: 425 - DNA, 14 bp, Artificial sequence
  Synthetic oligonucleotide
aattaacatcattt

SEQ ID NO: 426 - DNA, 14 bp, Artificial sequence
  Synthetic oligonucleotide
taattaacatcatt

SEQ ID NO: 427 - DNA, 14 bp, Artificial sequence
  Synthetic oligonucleotide
ctaattaacatcat

SEQ ID NO: 428 - DNA, 14 bp, Artificial sequence
  Synthetic oligonucleotide
cctaattaacatca

SEQ ID NO: 429 - DNA, 14 bp, Artificial sequence
  Synthetic oligonucleotide
ccctaattaacatc

SEQ ID NO: 430 - DNA, 14 bp, Artificial sequence
  Synthetic oligonucleotide
gccctaattaacat

SEQ ID NO: 431 - DNA, 14 bp, Artificial sequence
  Synthetic oligonucleotide
ggccctaattaaca

SEQ ID NO: 432 - DNA, 14 bp, Artificial sequence
  Synthetic oligonucleotide
cggccctaattaac

SEQ ID NO: 433 - DNA, 14 bp, Artificial sequence
  Synthetic oligonucleotide
aaacacattttttt

SEQ ID NO: 434 - DNA, 14 bp, Artificial sequence
  Synthetic oligonucleotide
taaacacatttttt

SEQ ID NO: 435 - DNA, 14 bp, Artificial sequence
  Synthetic oligonucleotide
ataaacacattttt

SEQ ID NO: 436 - DNA, 14 bp, Artificial sequence
  Synthetic oligonucleotide
tataaacacatttt

SEQ ID NO: 437 - DNA, 14 bp, Artificial sequence
  Synthetic oligonucleotide
atataaacacattt

SEQ ID NO: 438 - DNA, 14 bp, Artificial sequence
  Synthetic oligonucleotide
catataaacacatt

SEQ ID NO: 439 - DNA, 14 bp, Artificial sequence
  Synthetic oligonucleotide
acatataaacacat

SEQ ID NO: 440 - DNA, 14 bp, Artificial sequence
  Synthetic oligonucleotide
aacatataaacaca

SEQ ID NO: 441 - DNA, 14 bp, Artificial sequence
  Synthetic oligonucleotide
taacatataaacac

SEQ ID NO: 442 - DNA, 14 bp, Artificial sequence
  Synthetic oligonucleotide
ataacatataaaca

SEQ ID NO: 443 - DNA, 14 bp, Artificial sequence
  Synthetic oligonucleotide
tataacatataaac

SEQ ID NO: 444 - DNA, 14 bp, Artificial sequence
  Synthetic oligonucleotide
atataacatataaa

SEQ ID NO: 445 - DNA, 14 bp, Artificial sequence
  Synthetic oligonucleotide
catataacatataa

SEQ ID NO: 446 - DNA, 14 bp, Artificial sequence
  Synthetic oligonucleotide
acatataacatata

SEQ ID NO: 447 - DNA, 14 bp, Artificial sequence
  Synthetic oligonucleotide
cacatataacatat

SEQ ID NO: 448 - DNA, 14 bp, Artificial sequence
  Synthetic oligonucleotide
tcacatataacata

SEQ ID NO: 449 - DNA, 14 bp, Artificial sequence
  Synthetic oligonucleotide
atcacatataacat

SEQ ID NO: 450 - DNA, 14 bp, Artificial sequence
  Synthetic oligonucleotide
tatcacatataaca

SEQ ID NO: 451 - DNA, 14 bp, Artificial sequence
  Synthetic oligonucleotide
ctatcacatataac

SEQ ID NO: 452 - DNA, 14 bp, Artificial sequence
  Synthetic oligonucleotide
actatcacatataa

SEQ ID NO: 453 - DNA, 14 bp, Artificial sequence
  Synthetic oligonucleotide
cactatcacatata

SEQ ID NO: 454 - DNA, 14 bp, Artificial sequence
  Synthetic oligonucleotide
gtccaacataactc

SEQ ID NO: 455 - DNA, 14 bp, Artificial sequence
  Synthetic oligonucleotide
agtccaacataact

SEQ ID NO: 456 - DNA, 14 bp, Artificial sequence
  Synthetic oligonucleotide
cagtccaacataac

SEQ ID NO: 457 - DNA, 14 bp, Artificial sequence
  Synthetic oligonucleotide
tcagtccaacataa

SEQ ID NO: 458 - DNA, 14 bp, Artificial sequence
  Synthetic oligonucleotide
atcagtccaacata

SEQ ID NO: 459 - DNA, 14 bp, Artificial sequence
  Synthetic oligonucleotide
tatcagtccaacat

SEQ ID NO: 460 - DNA, 14 bp, Artificial sequence
  Synthetic oligonucleotide
aaaccctcccaaaa

SEQ ID NO: 461 - DNA, 14 bp, Artificial sequence
  Synthetic oligonucleotide
taaaccctcccaaa

SEQ ID NO: 462 - DNA, 14 bp, Artificial sequence
  Synthetic oligonucleotide
ttaaaccctcccaa

SEQ ID NO: 463 - DNA, 14 bp, Artificial sequence
  Synthetic oligonucleotide
attaaaccctccca

SEQ ID NO: 464 - DNA, 14 bp, Artificial sequence
  Synthetic oligonucleotide
cattaaaccctccc

SEQ ID NO: 465 - DNA, 14 bp, Artificial sequence
  Synthetic oligonucleotide
acattaaaccctcc

SEQ ID NO: 466 - DNA, 14 bp, Artificial sequence
  Synthetic oligonucleotide
aacattaaaccctc

SEQ ID NO: 467 - DNA, 14 bp, Artificial sequence
  Synthetic oligonucleotide
aaacattaaaccct

SEQ ID NO: 468 - DNA, 14 bp, Artificial sequence
  Synthetic oligonucleotide
taaacattaaaccc

SEQ ID NO: 469 - DNA, 14 bp, Artificial sequence
  Synthetic oligonucleotide
ataaacattaaacc

SEQ ID NO: 470 - DNA, 14 bp, Artificial sequence
  Synthetic oligonucleotide
tataaacattaaac

SEQ ID NO: 471 - DNA, 14 bp, Artificial sequence
  Synthetic oligonucleotide
ctataaacattaaa

SEQ ID NO: 472 - DNA, 14 bp, Artificial sequence
  Synthetic oligonucleotide
actataaacattaa

SEQ ID NO: 473 - DNA, 14 bp, Artificial sequence
  Synthetic oligonucleotide
aactataaacatta

SEQ ID NO: 474 - DNA, 14 bp, Artificial sequence
  Synthetic oligonucleotide
aaactataaacatt

SEQ ID NO: 475 - DNA, 14 bp, Artificial sequence
  Synthetic oligonucleotide
taaactataaacat

SEQ ID NO: 476 - DNA, 14 bp, Artificial sequence
  Synthetic oligonucleotide
ttaaactataaaca

SEQ ID NO: 477 - DNA, 14 bp, Artificial sequence
  Synthetic oligonucleotide
tttaaactataaac

SEQ ID NO: 478 - DNA, 14 bp, Artificial sequence
  Synthetic oligonucleotide
ctttaaactataaa

SEQ ID NO: 479 - DNA, 14 bp, Artificial sequence
  Synthetic oligonucleotide
gctttaaactataa

SEQ ID NO: 480 - DNA, 14 bp, Artificial sequence
  Synthetic oligonucleotide
tgctttaaactata

SEQ ID NO: 481 - DNA, 14 bp, Artificial sequence
  Synthetic oligonucleotide
cagcctatcaccac

SEQ ID NO: 482 - DNA, 14 bp, Artificial sequence
  Synthetic oligonucleotide
acagcctatcacca

SEQ ID NO: 483 - DNA, 14 bp, Artificial sequence
  Synthetic oligonucleotide
cacagcctatcacc

SEQ ID NO: 484 - DNA, 14 bp, Artificial sequence
  Synthetic oligonucleotide
tcacagcctatcac

SEQ ID NO: 485 - DNA, 14 bp, Artificial sequence
  Synthetic oligonucleotide
atcacagcctatca

SEQ ID NO: 486 - DNA, 14 bp, Artificial sequence
  Synthetic oligonucleotide
aatcacagcctatc

SEQ ID NO: 487 - DNA, 14 bp, Artificial sequence
  Synthetic oligonucleotide
aaatcacagcctat

SEQ ID NO: 488 - DNA, 14 bp, Artificial sequence
  Synthetic oligonucleotide
caaatcacagccta

SEQ ID NO: 489 - DNA, 14 bp, Artificial sequence
  Synthetic oligonucleotide
ccaaatcacagcct

SEQ ID NO: 490 - DNA, 14 bp, Artificial sequence
  Synthetic oligonucleotide
cccaaatcacagcc

SEQ ID NO: 491 - DNA, 14 bp, Artificial sequence
  Synthetic oligonucleotide
acccaaatcacagc

SEQ ID NO: 492 - DNA, 14 bp, Artificial sequence
  Synthetic oligonucleotide
cacccaaatcacag

SEQ ID NO: 493 - DNA, 14 bp, Artificial sequence
  Synthetic oligonucleotide
tcacccaaatcaca

SEQ ID NO: 494 - DNA, 14 bp, Artificial sequence
  Synthetic oligonucleotide
gtcacccaaatcac

SEQ ID NO: 495 - DNA, 14 bp, Artificial sequence
  Synthetic oligonucleotide
cgtcacccaaatca

SEQ ID NO: 496 - DNA, 14 bp, Artificial sequence
  Synthetic oligonucleotide
gcgtcacccaaatc

SEQ ID NO: 497 - DNA, 14 bp, Artificial sequence
  Synthetic oligonucleotide
agcgtcacccaaat

SEQ ID NO: 498 - DNA, 14 bp, Artificial sequence
  Synthetic oligonucleotide
atcctaaaatcact

SEQ ID NO: 499 - DNA, 14 bp, Artificial sequence
  Synthetic oligonucleotide
gatcctaaaatcac

SEQ ID NO: 500 - DNA, 14 bp, Artificial sequence
  Synthetic oligonucleotide
agatcctaaaatca

SEQ ID NO: 501 - DNA, 14 bp, Artificial sequence
  Synthetic oligonucleotide
cagatcctaaaatc

SEQ ID NO: 502 - DNA, 14 bp, Artificial sequence
  Synthetic oligonucleotide
tcagatcctaaaat

SEQ ID NO: 503 - DNA, 14 bp, Artificial sequence
  Synthetic oligonucleotide
aaaccaatcatcat

SEQ ID NO: 504 - DNA, 14 bp, Artificial sequence
  Synthetic oligonucleotide
aaaaccaatcatca

SEQ ID NO: 505 - DNA, 14 bp, Artificial sequence
  Synthetic oligonucleotide
taaaaccaatcatc

SEQ ID NO: 506 - DNA, 14 bp, Artificial sequence
  Synthetic oligonucleotide
gtaaaaccaatcat

SEQ ID NO: 507 - DNA, 14 bp, Artificial sequence
  Synthetic oligonucleotide
agtaaaaccaatca

SEQ ID NO: 508 - DNA, 14 bp, Artificial sequence
  Synthetic oligonucleotide
aagtaaaaccaatc

SEQ ID NO: 509 - DNA, 14 bp, Artificial sequence
  Synthetic oligonucleotide
aaagtaaaaccaat

SEQ ID NO: 510 - DNA, 14 bp, Artificial sequence
  Synthetic oligonucleotide
catctctactaaaa

SEQ ID NO: 511 - DNA, 14 bp, Artificial sequence
  Synthetic oligonucleotide
ccatctctactaaa

SEQ ID NO: 512 - DNA, 14 bp, Artificial sequence
  Synthetic oligonucleotide
tccatctctactaa

SEQ ID NO: 513 - DNA, 14 bp, Artificial sequence
  Synthetic oligonucleotide
ttccatctctacta

SEQ ID NO: 514 - DNA, 14 bp, Artificial sequence
  Synthetic oligonucleotide
cttccatctctact

SEQ ID NO: 515 - DNA, 14 bp, Artificial sequence
  Synthetic oligonucleotide
ccttccatctctac

SEQ ID NO: 516 - DNA, 14 bp, Artificial sequence
  Synthetic oligonucleotide
cccttccatctcta

SEQ ID NO: 517 - DNA, 14 bp, Artificial sequence
  Synthetic oligonucleotide
acataacaaaccca

SEQ ID NO: 518 - DNA, 14 bp, Artificial sequence
  Synthetic oligonucleotide
tacataacaaaccc

SEQ ID NO: 519 - DNA, 14 bp, Artificial sequence
  Synthetic oligonucleotide
ctacataacaaacc

SEQ ID NO: 520 - DNA, 14 bp, Artificial sequence
  Synthetic oligonucleotide
actacataacaaac

SEQ ID NO: 521 - DNA, 14 bp, Artificial sequence
  Synthetic oligonucleotide
aactacataacaaa

SEQ ID NO: 522 - DNA, 14 bp, Artificial sequence
  Synthetic oligonucleotide
taactacataacaa

SEQ ID NO: 523 - DNA, 14 bp, Artificial sequence
  Synthetic oligonucleotide
ataactacataaca

SEQ ID NO: 524 - DNA, 14 bp, Artificial sequence
  Synthetic oligonucleotide
aataactacataac

SEQ ID NO: 525 - DNA, 14 bp, Artificial sequence
  Synthetic oligonucleotide
caataactacataa

SEQ ID NO: 526 - DNA, 14 bp, Artificial sequence
  Synthetic oligonucleotide
acaataactacata

SEQ ID NO: 527 - DNA, 14 bp, Artificial sequence
  Synthetic oligonucleotide
cacaataactacat

SEQ ID NO: 528 - DNA, 14 bp, Artificial sequence
  Synthetic oligonucleotide
tcacaataactaca

SEQ ID NO: 529 - DNA, 14 bp, Artificial sequence
  Synthetic oligonucleotide
ttcacaataactac

SEQ ID NO: 530 - DNA, 14 bp, Artificial sequence
  Synthetic oligonucleotide
attcacaataacta

SEQ ID NO: 531 - DNA, 14 bp, Artificial sequence
  Synthetic oligonucleotide
aattcacaataact

SEQ ID NO: 532 - DNA, 14 bp, Artificial sequence
  Synthetic oligonucleotide
gaattcacaataac

SEQ ID NO: 533 - DNA, 14 bp, Artificial sequence
  Synthetic oligonucleotide
tgaattcacaataa

SEQ ID NO: 534 - DNA, 14 bp, Artificial sequence
  Synthetic oligonucleotide
ctaaaacaatctaa

SEQ ID NO: 535 - DNA, 14 bp, Artificial sequence
  Synthetic oligonucleotide
cctaaaacaatcta

SEQ ID NO: 536 - DNA, 14 bp, Artificial sequence
  Synthetic oligonucleotide
acctaaaacaatct

SEQ ID NO: 537 - DNA, 14 bp, Artificial sequence
  Synthetic oligonucleotide
tacctaaaacaatc

SEQ ID NO: 538 - DNA, 14 bp, Artificial sequence
  Synthetic oligonucleotide
atacctaaaacaat

SEQ ID NO: 539 - DNA, 14 bp, Artificial sequence
  Synthetic oligonucleotide
tatacctaaaacaa

SEQ ID NO: 540 - DNA, 14 bp, Artificial sequence
  Synthetic oligonucleotide
ctatacctaaaaca

SEQ ID NO: 541 - DNA, 14 bp, Artificial sequence
  Synthetic oligonucleotide
gctatacctaaaac

SEQ ID NO: 542 - DNA, 14 bp, Artificial sequence
  Synthetic oligonucleotide
ttgtaactaaaaat

SEQ ID NO: 543 - DNA, 14 bp, Artificial sequence
  Synthetic oligonucleotide
cttgtaactaaaaa

SEQ ID NO: 544 - DNA, 14 bp, Artificial sequence
  Synthetic oligonucleotide
ccttgtaactaaaa

SEQ ID NO: 545 - DNA, 14 bp, Artificial sequence
  Synthetic oligonucleotide
cccttgtaactaaa

SEQ ID NO: 546 - DNA, 14 bp, Artificial sequence
  Synthetic oligonucleotide
ccccttgtaactaa

SEQ ID NO: 547 - DNA, 14 bp, Artificial sequence
  Synthetic oligonucleotide
accccttgtaacta

SEQ ID NO: 548 - DNA, 14 bp, Artificial sequence
  Synthetic oligonucleotide
caccccttgtaact

SEQ ID NO: 549 - DNA, 14 bp, Artificial sequence
  Synthetic oligonucleotide
acaccccttgtaac

SEQ ID NO: 550 - DNA, 14 bp, Artificial sequence
  Synthetic oligonucleotide
ttcatatatacatc

SEQ ID NO: 551 - DNA, 14 bp, Artificial sequence
  Synthetic oligonucleotide
cttcatatatacat

SEQ ID NO: 552 - DNA, 14 bp, Artificial sequence
  Synthetic oligonucleotide
ccttcatatataca

SEQ ID NO: 553 - DNA, 14 bp, Artificial sequence
  Synthetic oligonucleotide
cccttcatatatac

SEQ ID NO: 554 - DNA, 14 bp, Artificial sequence
  Synthetic oligonucleotide
acccttcatatata

SEQ ID NO: 555 - DNA, 14 bp, Artificial sequence
  Synthetic oligonucleotide
tacccttcatatat

SEQ ID NO: 556 - DNA, 14 bp, Artificial sequence
  Synthetic oligonucleotide
ttacccttcatata

SEQ ID NO: 557 - DNA, 14 bp, Artificial sequence
  Synthetic oligonucleotide
attacccttcatat

SEQ ID NO: 558 - DNA, 14 bp, Artificial sequence
  Synthetic oligonucleotide
cattacccttcata

SEQ ID NO: 559 - DNA, 14 bp, Artificial sequence
  Synthetic oligonucleotide
acattacccttcat

SEQ ID NO: 560 - DNA, 14 bp, Artificial sequence
  Synthetic oligonucleotide
tacattacccttca

SEQ ID NO: 561 - DNA, 14 bp, Artificial sequence
  Synthetic oligonucleotide
tcttatacttacta

SEQ ID NO: 562 - DNA, 14 bp, Artificial sequence
  Synthetic oligonucleotide
ttcttatacttact

SEQ ID NO: 563 - DNA, 14 bp, Artificial sequence
  Synthetic oligonucleotide
attcttatacttac

SEQ ID NO: 564 - DNA, 14 bp, Artificial sequence
  Synthetic oligonucleotide
gattcttatactta

SEQ ID NO: 565 - DNA, 14 bp, Artificial sequence
  Synthetic oligonucleotide
tgattcttatactt

SEQ ID NO: 566 - DNA, 14 bp, Artificial sequence
  Synthetic oligonucleotide
atgattcttatact

SEQ ID NO: 567 - DNA, 14 bp, Artificial sequence
  Synthetic oligonucleotide
aacttcactaaaat

SEQ ID NO: 568 - DNA, 14 bp, Artificial sequence
  Synthetic oligonucleotide
aaacttcactaaaa

SEQ ID NO: 569 - DNA, 14 bp, Artificial sequence
  Synthetic oligonucleotide
taaacttcactaaa

SEQ ID NO: 570 - DNA, 14 bp, Artificial sequence
  Synthetic oligonucleotide
ataaacttcactaa

SEQ ID NO: 571 - DNA, 14 bp, Artificial sequence
  Synthetic oligonucleotide
aataaacttcacta

SEQ ID NO: 572 - DNA, 14 bp, Artificial sequence
  Synthetic oligonucleotide
taataaacttcact

SEQ ID NO: 573 - DNA, 14 bp, Artificial sequence
  Synthetic oligonucleotide
ctaataaacttcac

SEQ ID NO: 574 - DNA, 14 bp, Artificial sequence
  Synthetic oligonucleotide
actaataaacttca

SEQ ID NO: 575 - DNA, 14 bp, Artificial sequence
  Synthetic oligonucleotide
aactaataaacttc

SEQ ID NO: 576 - DNA, 14 bp, Artificial sequence
  Synthetic oligonucleotide
aatcttctatttta

SEQ ID NO: 577 - DNA, 14 bp, Artificial sequence
  Synthetic oligonucleotide
caatcttctatttt

SEQ ID NO: 578 - DNA, 14 bp, Artificial sequence
  Synthetic oligonucleotide
ccaatcttctattt

SEQ ID NO: 579 - DNA, 14 bp, Artificial sequence
  Synthetic oligonucleotide
accaatcttctatt

SEQ ID NO: 580 - DNA, 14 bp, Artificial sequence
  Synthetic oligonucleotide
aaccaatcttctat

SEQ ID NO: 581 - DNA, 14 bp, Artificial sequence
  Synthetic oligonucleotide
caaccaatcttcta

SEQ ID NO: 582 - DNA, 14 bp, Artificial sequence
  Synthetic oligonucleotide
gcaaccaatcttct

SEQ ID NO: 583 - DNA, 14 bp, Artificial sequence
  Synthetic oligonucleotide
tgcaaccaatcttc

SEQ ID NO: 584 - DNA, 14 bp, Artificial sequence
  Synthetic oligonucleotide
ctgcaaccaatctt

SEQ ID NO: 585 - DNA, 14 bp, Artificial sequence
  Synthetic oligonucleotide
actgcaaccaatct

SEQ ID NO: 586 - DNA, 14 bp, Artificial sequence
  Synthetic oligonucleotide
aactgcaaccaatc

SEQ ID NO: 587 - DNA, 14 bp, Artificial sequence
  Synthetic oligonucleotide
taactgcaaccaat

SEQ ID NO: 588 - DNA, 14 bp, Artificial sequence
  Synthetic oligonucleotide
tacaacacacatca

SEQ ID NO: 589 - DNA, 14 bp, Artificial sequence
  Synthetic oligonucleotide
atacaacacacatc

SEQ ID NO: 590 - DNA, 14 bp, Artificial sequence
  Synthetic oligonucleotide
aatacaacacacat

SEQ ID NO: 591 - DNA, 14 bp, Artificial sequence
  Synthetic oligonucleotide
gaatacaacacaca

SEQ ID NO: 592 - DNA, 14 bp, Artificial sequence
  Synthetic oligonucleotide
tgaatacaacacac

SEQ ID NO: 593 - DNA, 14 bp, Artificial sequence
  Synthetic oligonucleotide
atgaatacaacaca

SEQ ID NO: 594 - DNA, 14 bp, Artificial sequence
  Synthetic oligonucleotide
cctaataaaatata

SEQ ID NO: 595 - DNA, 14 bp, Artificial sequence
  Synthetic oligonucleotide
tcctaataaaatat

SEQ ID NO: 596 - DNA, 14 bp, Artificial sequence
  Synthetic oligonucleotide
ctcctaataaaata

SEQ ID NO: 597 - DNA, 14 bp, Artificial sequence
  Synthetic oligonucleotide
actcctaataaaat

SEQ ID NO: 598 - DNA, 14 bp, Artificial sequence
  Synthetic oligonucleotide
tactcctaataaaa

SEQ ID NO: 599 - DNA, 14 bp, Artificial sequence
  Synthetic oligonucleotide
ctactcctaataaa

SEQ ID NO: 600 - DNA, 14 bp, Artificial sequence
  Synthetic oligonucleotide
actactcctaataa

SEQ ID NO: 601 - DNA, 14 bp, Artificial sequence
  Synthetic oligonucleotide
aactactcctaata

SEQ ID NO: 602 - DNA, 14 bp, Artificial sequence
  Synthetic oligonucleotide
taactactcctaat

SEQ ID NO: 603 - DNA, 14 bp, Artificial sequence
  Synthetic oligonucleotide
ataactactcctaa

SEQ ID NO: 604 - DNA, 14 bp, Artificial sequence
  Synthetic oligonucleotide
tataactactccta

SEQ ID NO: 605 - DNA, 14 bp, Artificial sequence
  Synthetic oligonucleotide
atataactactcct

SEQ ID NO: 606 - DNA, 14 bp, Artificial sequence
  Synthetic oligonucleotide
aatataactactcc

SEQ ID NO: 607 - DNA, 14 bp, Artificial sequence
  Synthetic oligonucleotide
aaatataactactc

SEQ ID NO: 608 - DNA, 14 bp, Artificial sequence
  Synthetic oligonucleotide
aaaatataactact

SEQ ID NO: 609 - DNA, 14 bp, Artificial sequence
  Synthetic oligonucleotide
aaaaatataactac

SEQ ID NO: 610 - DNA, 14 bp, Artificial sequence
  Synthetic oligonucleotide
taaaaatataacta

SEQ ID NO: 611 - DNA, 14 bp, Artificial sequence
  Synthetic oligonucleotide
gtaaaaatataact

SEQ ID NO: 612 - DNA, 14 bp, Artificial sequence
  Synthetic oligonucleotide
agtaaaaatataac

SEQ ID NO: 613 - DNA, 14 bp, Artificial sequence
  Synthetic oligonucleotide
actgatacccacaa

SEQ ID NO: 614 - DNA, 14 bp, Artificial sequence
  Synthetic oligonucleotide
aactgatacccaca

SEQ ID NO: 615 - DNA, 14 bp, Artificial sequence
  Synthetic oligonucleotide
caactgatacccac

SEQ ID NO: 616 - DNA, 14 bp, Artificial sequence
  Synthetic oligonucleotide
tcaactgataccca

SEQ ID NO: 617 - DNA, 14 bp, Artificial sequence
  Synthetic oligonucleotide
atcactaaaaaact

SEQ ID NO: 618 - DNA, 14 bp, Artificial sequence
  Synthetic oligonucleotide
tatcactaaaaaac

SEQ ID NO: 619 - DNA, 14 bp, Artificial sequence
  Synthetic oligonucleotide
atatcactaaaaaa

SEQ ID NO: 620 - DNA, 14 bp, Artificial sequence
  Synthetic oligonucleotide
tatatcactaaaaa

SEQ ID NO: 621 - DNA, 14 bp, Artificial sequence
  Synthetic oligonucleotide
ttatatcactaaaa

SEQ ID NO: 622 - DNA, 14 bp, Artificial sequence
  Synthetic oligonucleotide
tttatatcactaaa

SEQ ID NO: 623 - DNA, 14 bp, Artificial sequence
  Synthetic oligonucleotide
gtttatatcactaa

SEQ ID NO: 624 - DNA, 14 bp, Artificial sequence
  Synthetic oligonucleotide
aaacttttaattaa

SEQ ID NO: 625 - DNA, 14 bp, Artificial sequence
  Synthetic oligonucleotide
caaacttttaatta

SEQ ID NO: 626 - DNA, 14 bp, Artificial sequence
  Synthetic oligonucleotide
tcaaacttttaatt

SEQ ID NO: 627 - DNA, 14 bp, Artificial sequence
  Synthetic oligonucleotide
ttcaaacttttaat

SEQ ID NO: 628 - DNA, 14 bp, Artificial sequence
  Synthetic oligonucleotide
cttcaaacttttaa

SEQ ID NO: 629 - DNA, 14 bp, Artificial sequence
  Synthetic oligonucleotide
acttcaaactttta

SEQ ID NO: 630 - DNA, 14 bp, Artificial sequence
  Synthetic oligonucleotide
cacttcaaactttt

SEQ ID NO: 631 - DNA, 14 bp, Artificial sequence
  Synthetic oligonucleotide
ccacttcaaacttt

SEQ ID NO: 632 - DNA, 14 bp, Artificial sequence
  Synthetic oligonucleotide
cccacttcaaactt

SEQ ID NO: 633 - DNA, 14 bp, Artificial sequence
  Synthetic oligonucleotide
acccacttcaaact

SEQ ID NO: 634 - DNA, 14 bp, Artificial sequence
  Synthetic oligonucleotide
aacccacttcaaac

SEQ ID NO: 635 - DNA, 14 bp, Artificial sequence
  Synthetic oligonucleotide
aaacccacttcaaa

SEQ ID NO: 636 - DNA, 14 bp, Artificial sequence
  Synthetic oligonucleotide
aaaacccacttcaa

SEQ ID NO: 637 - DNA, 14 bp, Artificial sequence
  Synthetic oligonucleotide
aaaaacccacttca

SEQ ID NO: 638 - DNA, 14 bp, Artificial sequence
  Synthetic oligonucleotide
aaaaaacccacttc

SEQ ID NO: 639 - DNA, 14 bp, Artificial sequence
  Synthetic oligonucleotide
caaaaaacccactt

SEQ ID NO: 640 - DNA, 14 bp, Artificial sequence
  Synthetic oligonucleotide
acaaaaaacccact

SEQ ID NO: 641 - DNA, 14 bp, Artificial sequence
  Synthetic oligonucleotide
aacaaaaaacccac

SEQ ID NO: 642 - DNA, 14 bp, Artificial sequence
  Synthetic oligonucleotide
aaacaaaaaaccca

SEQ ID NO: 643 - DNA, 14 bp, Artificial sequence
  Synthetic oligonucleotide
aaaacaaaaaaccc

SEQ ID NO: 644 - DNA, 14 bp, Artificial sequence
  Synthetic oligonucleotide
atcttcccattaat

SEQ ID NO: 645 - DNA, 14 bp, Artificial sequence
  Synthetic oligonucleotide
aatcttcccattaa

SEQ ID NO: 646 - DNA, 14 bp, Artificial sequence
  Synthetic oligonucleotide
taatcttcccatta

SEQ ID NO: 647 - DNA, 14 bp, Artificial sequence
  Synthetic oligonucleotide
ataatcttcccatt

SEQ ID NO: 648 - DNA, 14 bp, Artificial sequence
  Synthetic oligonucleotide
aataatcttcccat

SEQ ID NO: 649 - DNA, 14 bp, Artificial sequence
  Synthetic oligonucleotide
aaataatcttccca

SEQ ID NO: 650 - DNA, 14 bp, Artificial sequence
  Synthetic oligonucleotide
aaaataatcttccc

SEQ ID NO: 651 - DNA, 14 bp, Artificial sequence
  Synthetic oligonucleotide
tattaatcaaaaat

SEQ ID NO: 652 - DNA, 14 bp, Artificial sequence
  Synthetic oligonucleotide
ctattaatcaaaaa

SEQ ID NO: 653 - DNA, 14 bp, Artificial sequence
  Synthetic oligonucleotide
tctattaatcaaaa

SEQ ID NO: 654 - DNA, 14 bp, Artificial sequence
  Synthetic oligonucleotide
ctctattaatcaaa

SEQ ID NO: 655 - DNA, 14 bp, Artificial sequence
  Synthetic oligonucleotide
actctattaatcaa

SEQ ID NO: 656 - DNA, 14 bp, Artificial sequence
  Synthetic oligonucleotide
gactctattaatca

SEQ ID NO: 657 - DNA, 14 bp, Artificial sequence
  Synthetic oligonucleotide
tattctactcttct

SEQ ID NO: 658 - DNA, 14 bp, Artificial sequence
  Synthetic oligonucleotide
atattctactcttc

SEQ ID NO: 659 - DNA, 14 bp, Artificial sequence
  Synthetic oligonucleotide
aatattctactctt

SEQ ID NO: 660 - DNA, 14 bp, Artificial sequence
  Synthetic oligonucleotide
gaatattctactct

SEQ ID NO: 661 - DNA, 14 bp, Artificial sequence
  Synthetic oligonucleotide
agaatattctactc

SEQ ID NO: 662 - DNA, 14 bp, Artificial sequence
  Synthetic oligonucleotide
atttaccaattcaa

SEQ ID NO: 663 - DNA, 14 bp, Artificial sequence
  Synthetic oligonucleotide
tatttaccaattca

SEQ ID NO: 664 - DNA, 14 bp, Artificial sequence
  Synthetic oligonucleotide
gtatttaccaattc

SEQ ID NO: 665 - DNA, 14 bp, Artificial sequence
  Synthetic oligonucleotide
tgtatttaccaatt

SEQ ID NO: 666 - DNA, 14 bp, Artificial sequence
  Synthetic oligonucleotide
ctgtatttaccaat

SEQ ID NO: 667 - DNA, 14 bp, Artificial sequence
  Synthetic oligonucleotide
actgtatttaccaa

SEQ ID NO: 668 - DNA, 14 bp, Artificial sequence
  Synthetic oligonucleotide
ttataccatcaaat

SEQ ID NO: 669 - DNA, 14 bp, Artificial sequence
  Synthetic oligonucleotide
attataccatcaaa

SEQ ID NO: 670 - DNA, 14 bp, Artificial sequence
  Synthetic oligonucleotide
cattataccatcaa

SEQ ID NO: 671 - DNA, 14 bp, Artificial sequence
  Synthetic oligonucleotide
tcattataccatca

SEQ ID NO: 672 - DNA, 14 bp, Artificial sequence
  Synthetic oligonucleotide
ttcattataccatc

SEQ ID NO: 673 - DNA, 14 bp, Artificial sequence
  Synthetic oligonucleotide
cttcattataccat

SEQ ID NO: 674 - DNA, 14 bp, Artificial sequence
  Synthetic oligonucleotide
tcttcattatacca

SEQ ID NO: 675 - DNA, 14 bp, Artificial sequence
  Synthetic oligonucleotide
ttcttcattatacc

SEQ ID NO: 676 - DNA, 14 bp, Artificial sequence
  Synthetic oligonucleotide
tttcttcattatac

SEQ ID NO: 677 - DNA, 14 bp, Artificial sequence
  Synthetic oligonucleotide
ttttcttcattata

SEQ ID NO: 678 - DNA, 14 bp, Artificial sequence
  Synthetic oligonucleotide
attttcttcattat

SEQ ID NO: 679 - DNA, 14 bp, Artificial sequence
  Synthetic oligonucleotide
tattttcttcatta

SEQ ID NO: 680 - DNA, 14 bp, Artificial sequence
  Synthetic oligonucleotide
atattttcttcatt

SEQ ID NO: 681 - DNA, 14 bp, Artificial sequence
  Synthetic oligonucleotide
aatattttcttcat

SEQ ID NO: 682 - DNA, 14 bp, Artificial sequence
  Synthetic oligonucleotide
aaatattttcttca

SEQ ID NO: 683 - DNA, 14 bp, Artificial sequence
  Synthetic oligonucleotide
taaatattttcttc

SEQ ID NO: 684 - DNA, 14 bp, Artificial sequence
  Synthetic oligonucleotide
aataatccaaactt

SEQ ID NO: 685 - DNA, 14 bp, Artificial sequence
  Synthetic oligonucleotide
aaataatccaaact

SEQ ID NO: 686 - DNA, 14 bp, Artificial sequence
  Synthetic oligonucleotide
aaaataatccaaac

SEQ ID NO: 687 - DNA, 14 bp, Artificial sequence
  Synthetic oligonucleotide
caaaataatccaaa

SEQ ID NO: 688 - DNA, 14 bp, Artificial sequence
  Synthetic oligonucleotide
acaaaataatccaa

SEQ ID NO: 689 - DNA, 14 bp, Artificial sequence
  Synthetic oligonucleotide
tacaaaataatcca

SEQ ID NO: 690 - DNA, 14 bp, Artificial sequence
  Synthetic oligonucleotide
ttacaaaataatcc

SEQ ID NO: 691 - DNA, 14 bp, Artificial sequence
  Synthetic oligonucleotide
gttacaaaataatc

SEQ ID NO: 692 - DNA, 14 bp, Artificial sequence
  Synthetic oligonucleotide
tgttacaaaataat

SEQ ID NO: 693 - DNA, 14 bp, Artificial sequence
  Synthetic oligonucleotide
ttttacattaacta

SEQ ID NO: 694 - DNA, 14 bp, Artificial sequence
  Synthetic oligonucleotide
tttttacattaact

SEQ ID NO: 695 - DNA, 14 bp, Artificial sequence
  Synthetic oligonucleotide
ttttttacattaac

SEQ ID NO: 696 - DNA, 14 bp, Artificial sequence
  Synthetic oligonucleotide
attttttacattaa

SEQ ID NO: 697 - DNA, 14 bp, Artificial sequence
  Synthetic oligonucleotide
tattttttacatta

SEQ ID NO: 698 - DNA, 14 bp, Artificial sequence
  Synthetic oligonucleotide
ttattttttacatt

SEQ ID NO: 699 - DNA, 14 bp, Artificial sequence
  Synthetic oligonucleotide
aaatactaacatca

SEQ ID NO: 700 - DNA, 14 bp, Artificial sequence
  Synthetic oligonucleotide
aaaatactaacatc

SEQ ID NO: 701 - DNA, 14 bp, Artificial sequence
  Synthetic oligonucleotide
caaaatactaacat

SEQ ID NO: 702 - DNA, 14 bp, Artificial sequence
  Synthetic oligonucleotide
ccaaaatactaaca

SEQ ID NO: 703 - DNA, 14 bp, Artificial sequence
  Synthetic oligonucleotide
gccaaaatactaac

SEQ ID NO: 704 - DNA, 14 bp, Artificial sequence
  Synthetic oligonucleotide
tgccaaaatactaa

SEQ ID NO: 705 - DNA, 14 bp, Artificial sequence
  Synthetic oligonucleotide
tccattcattttat

SEQ ID NO: 706 - DNA, 14 bp, Artificial sequence
  Synthetic oligonucleotide
atccattcatttta

SEQ ID NO: 707 - DNA, 14 bp, Artificial sequence
  Synthetic oligonucleotide
catccattcatttt

SEQ ID NO: 708 - DNA, 14 bp, Artificial sequence
  Synthetic oligonucleotide
acatccattcattt

SEQ ID NO: 709 - DNA, 14 bp, Artificial sequence
  Synthetic oligonucleotide
cacatccattcatt

SEQ ID NO: 710 - DNA, 14 bp, Artificial sequence
  Synthetic oligonucleotide
ccacatccattcat

SEQ ID NO: 711 - DNA, 14 bp, Artificial sequence
  Synthetic oligonucleotide
gccacatccattca

SEQ ID NO: 712 - DNA, 14 bp, Artificial sequence
  Synthetic oligonucleotide
tgccacatccattc

SEQ ID NO: 713 - DNA, 14 bp, Artificial sequence
  Synthetic oligonucleotide
atgccacatccatt

SEQ ID NO: 714 - DNA, 14 bp, Artificial sequence
  Synthetic oligonucleotide
tatgccacatccat

SEQ ID NO: 715 - DNA, 14 bp, Artificial sequence
  Synthetic oligonucleotide
ttatgccacatcca

SEQ ID NO: 716 - DNA, 14 bp, Artificial sequence
  Synthetic oligonucleotide
attatgccacatcc

SEQ ID NO: 717 - DNA, 14 bp, Artificial sequence
  Synthetic oligonucleotide
tcttaactcttctc

SEQ ID NO: 718 - DNA, 14 bp, Artificial sequence
  Synthetic oligonucleotide
ttcttaactcttct

SEQ ID NO: 719 - DNA, 14 bp, Artificial sequence
  Synthetic oligonucleotide
gttcttaactcttc

SEQ ID NO: 720 - DNA, 14 bp, Artificial sequence
  Synthetic oligonucleotide
agttcttaactctt

SEQ ID NO: 721 - DNA, 14 bp, Artificial sequence
  Synthetic oligonucleotide
tagttcttaactct

SEQ ID NO: 722 - DNA, 14 bp, Artificial sequence
  Synthetic oligonucleotide
caaatactcaaaaa

SEQ ID NO: 723 - DNA, 14 bp, Artificial sequence
  Synthetic oligonucleotide
tcaaatactcaaaa

SEQ ID NO: 724 - DNA, 14 bp, Artificial sequence
  Synthetic oligonucleotide
ttcaaatactcaaa

SEQ ID NO: 725 - DNA, 14 bp, Artificial sequence
  Synthetic oligonucleotide
cttcaaatactcaa

SEQ ID NO: 726 - DNA, 14 bp, Artificial sequence
  Synthetic oligonucleotide
gcttcaaatactca

SEQ ID NO: 727 - DNA, 14 bp, Artificial sequence
  Synthetic oligonucleotide
agcttcaaatactc

SEQ ID NO: 728 - DNA, 14 bp, Artificial sequence
  Synthetic oligonucleotide
aagcttcaaatact

SEQ ID NO: 729 - DNA, 14 bp, Artificial sequence
  Synthetic oligonucleotide
cctcattacccatt

SEQ ID NO: 730 - DNA, 14 bp, Artificial sequence
  Synthetic oligonucleotide
tcctcattacccat

SEQ ID NO: 731 - DNA, 14 bp, Artificial sequence
  Synthetic oligonucleotide
atcctcattaccca

SEQ ID NO: 732 - DNA, 14 bp, Artificial sequence
  Synthetic oligonucleotide
tatcctcattaccc

SEQ ID NO: 733 - DNA, 14 bp, Artificial sequence
  Synthetic oligonucleotide
atatcctcattacc

SEQ ID NO: 734 - DNA, 14 bp, Artificial sequence
  Synthetic oligonucleotide
aatatcctcattac

SEQ ID NO: 735 - DNA, 14 bp, Artificial sequence
  Synthetic oligonucleotide
taatatcctcatta

SEQ ID NO: 736 - DNA, 14 bp, Artificial sequence
  Synthetic oligonucleotide
ttaatatcctcatt

SEQ ID NO: 737 - DNA, 14 bp, Artificial sequence
  Synthetic oligonucleotide
tttaatatcctcat

SEQ ID NO: 738 - DNA, 14 bp, Artificial sequence
  Synthetic oligonucleotide
atttaatatcctca

SEQ ID NO: 739 - DNA, 14 bp, Artificial sequence
  Synthetic oligonucleotide
aatttaatatcctc

SEQ ID NO: 740 - DNA, 14 bp, Artificial sequence
  Synthetic oligonucleotide
aaatttaatatcct

SEQ ID NO: 741 - DNA, 14 bp, Artificial sequence
  Synthetic oligonucleotide
taaatttaatatcc

SEQ ID NO: 742 - DNA, 14 bp, Artificial sequence
  Synthetic oligonucleotide
ttaaatttaatatc

SEQ ID NO: 743 - DNA, 14 bp, Artificial sequence
  Synthetic oligonucleotide
cttaaatttaatat

SEQ ID NO: 744 - DNA, 14 bp, Artificial sequence
  Synthetic oligonucleotide
tcttaaatttaata

SEQ ID NO: 745 - DNA, 14 bp, Artificial sequence
  Synthetic oligonucleotide
ttcttaaatttaat

SEQ ID NO: 746 - DNA, 14 bp, Artificial sequence
  Synthetic oligonucleotide
gttcttaaatttaa

SEQ ID NO: 747 - DNA, 14 bp, Artificial sequence
  Synthetic oligonucleotide
ttattctactttta

SEQ ID NO: 748 - DNA, 14 bp, Artificial sequence
  Synthetic oligonucleotide
tttattctactttt

SEQ ID NO: 749 - DNA, 14 bp, Artificial sequence
  Synthetic oligonucleotide
ctttattctacttt

SEQ ID NO: 750 - DNA, 14 bp, Artificial sequence
  Synthetic oligonucleotide
cctttattctactt

SEQ ID NO: 751 - DNA, 14 bp, Artificial sequence
  Synthetic oligonucleotide
gcctttattctact

SEQ ID NO: 752 - DNA, 14 bp, Artificial sequence
  Synthetic oligonucleotide
aacaattattaata

SEQ ID NO: 753 - DNA, 14 bp, Artificial sequence
  Synthetic oligonucleotide
caacaattattaat

SEQ ID NO: 754 - DNA, 14 bp, Artificial sequence
  Synthetic oligonucleotide
gcaacaattattaa

SEQ ID NO: 755 - DNA, 14 bp, Artificial sequence
  Synthetic oligonucleotide
agcaacaattatta

SEQ ID NO: 756 - DNA, 14 bp, Artificial sequence
  Synthetic oligonucleotide
cagcaacaattatt

SEQ ID NO: 757 - DNA, 14 bp, Artificial sequence
  Synthetic oligonucleotide
ccagcaacaattat

SEQ ID NO: 758 - DNA, 14 bp, Artificial sequence
  Synthetic oligonucleotide
accagcaacaatta

SEQ ID NO: 759 - DNA, 14 bp, Artificial sequence
  Synthetic oligonucleotide
aaaccaaaacttac

SEQ ID NO: 760 - DNA, 14 bp, Artificial sequence
  Synthetic oligonucleotide
aaaaccaaaactta

SEQ ID NO: 761 - DNA, 14 bp, Artificial sequence
  Synthetic oligonucleotide
aaaaaccaaaactt

SEQ ID NO: 762 - DNA, 14 bp, Artificial sequence
  Synthetic oligonucleotide
caaaaaccaaaact

SEQ ID NO: 763 - DNA, 14 bp, Artificial sequence
  Synthetic oligonucleotide
ccaaaaaccaaaac

SEQ ID NO: 764 - DNA, 14 bp, Artificial sequence
  Synthetic oligonucleotide
accaaaaaccaaaa

SEQ ID NO: 765 - DNA, 14 bp, Artificial sequence
  Synthetic oligonucleotide
aaccaaaaaccaaa

SEQ ID NO: 766 - DNA, 14 bp, Artificial sequence
  Synthetic oligonucleotide
aaaccaaaaaccaa

SEQ ID NO: 767 - DNA, 14 bp, Artificial sequence
  Synthetic oligonucleotide
atctaaaacacttc

SEQ ID NO: 768 - DNA, 14 bp, Artificial sequence
  Synthetic oligonucleotide
aatctaaaacactt

SEQ ID NO: 769 - DNA, 14 bp, Artificial sequence
  Synthetic oligonucleotide
aaatctaaaacact

SEQ ID NO: 770 - DNA, 14 bp, Artificial sequence
  Synthetic oligonucleotide
caaatctaaaacac

SEQ ID NO: 771 - DNA, 14 bp, Artificial sequence
  Synthetic oligonucleotide
ccaaatctaaaaca

SEQ ID NO: 772 - DNA, 14 bp, Artificial sequence
  Synthetic oligonucleotide
cccaaatctaaaac

SEQ ID NO: 773 - DNA, 14 bp, Artificial sequence
  Synthetic oligonucleotide
ccccaaatctaaaa

SEQ ID NO: 774 - DNA, 14 bp, Artificial sequence
  Synthetic oligonucleotide
accccaaatctaaa

SEQ ID NO: 775 - DNA, 14 bp, Artificial sequence
  Synthetic oligonucleotide
aaccccaaatctaa

SEQ ID NO: 776 - DNA, 14 bp, Artificial sequence
  Synthetic oligonucleotide
aaaccccaaatcta

SEQ ID NO: 777 - DNA, 14 bp, Artificial sequence
  Synthetic oligonucleotide
attcacaaatccta

SEQ ID NO: 778 - DNA, 14 bp, Artificial sequence
  Synthetic oligonucleotide
tattcacaaatcct

SEQ ID NO: 779 - DNA, 14 bp, Artificial sequence
  Synthetic oligonucleotide
atattcacaaatcc

SEQ ID NO: 780 - DNA, 14 bp, Artificial sequence
  Synthetic oligonucleotide
aatattcacaaatc

SEQ ID NO: 781 - DNA, 14 bp, Artificial sequence
  Synthetic oligonucleotide
aaatattcacaaat

SEQ ID NO: 782 - DNA, 14 bp, Artificial sequence
  Synthetic oligonucleotide
caaatattcacaaa

SEQ ID NO: 783 - DNA, 14 bp, Artificial sequence
  Synthetic oligonucleotide
gcaaatattcacaa

SEQ ID NO: 784 - DNA, 14 bp, Artificial sequence
  Synthetic oligonucleotide
aacacacattatca

SEQ ID NO: 785 - DNA, 14 bp, Artificial sequence
  Synthetic oligonucleotide
taacacacattatc

SEQ ID NO: 786 - DNA, 14 bp, Artificial sequence
  Synthetic oligonucleotide
ttaacacacattat

SEQ ID NO: 787 - DNA, 14 bp, Artificial sequence
  Synthetic oligonucleotide
tttaacacacatta

SEQ ID NO: 788 - DNA, 14 bp, Artificial sequence
  Synthetic oligonucleotide
atttaacacacatt

SEQ ID NO: 789 - DNA, 14 bp, Artificial sequence
  Synthetic oligonucleotide
tatttaacacacat

SEQ ID NO: 790 - DNA, 14 bp, Artificial sequence
  Synthetic oligonucleotide
ctatttaacacaca

SEQ ID NO: 791 - DNA, 14 bp, Artificial sequence
  Synthetic oligonucleotide
actatttaacacac

SEQ ID NO: 792 - DNA, 14 bp, Artificial sequence
  Synthetic oligonucleotide
tactatttaacaca

SEQ ID NO: 793 - DNA, 14 bp, Artificial sequence
  Synthetic oligonucleotide
ctactatttaacac

SEQ ID NO: 794 - DNA, 14 bp, Artificial sequence
  Synthetic oligonucleotide
actactatttaaca

SEQ ID NO: 795 - DNA, 14 bp, Artificial sequence
  Synthetic oligonucleotide
aactactatttaac

SEQ ID NO: 796 - DNA, 14 bp, Artificial sequence
  Synthetic oligonucleotide
aaactactatttaa

SEQ ID NO: 797 - DNA, 14 bp, Artificial sequence
  Synthetic oligonucleotide
aaaactactattta

SEQ ID NO: 798 - DNA, 14 bp, Artificial sequence
  Synthetic oligonucleotide
gaaaactactattt

SEQ ID NO: 799 - DNA, 14 bp, Artificial sequence
  Synthetic oligonucleotide
tgaaaactactatt

SEQ ID NO: 800 - DNA, 14 bp, Artificial sequence
  Synthetic oligonucleotide
aaataacctatcat

SEQ ID NO: 801 - DNA, 14 bp, Artificial sequence
  Synthetic oligonucleotide
aaaataacctatca

SEQ ID NO: 802 - DNA, 14 bp, Artificial sequence
  Synthetic oligonucleotide
caaaataacctatc

SEQ ID NO: 803 - DNA, 14 bp, Artificial sequence
  Synthetic oligonucleotide
acaaaataacctat

SEQ ID NO: 804 - DNA, 14 bp, Artificial sequence
  Synthetic oligonucleotide
cacaaaataaccta

SEQ ID NO: 805 - DNA, 14 bp, Artificial sequence
  Synthetic oligonucleotide
tcacaaaataacct

SEQ ID NO: 806 - DNA, 14 bp, Artificial sequence
  Synthetic oligonucleotide
atcacaaaataacc

SEQ ID NO: 807 - DNA, 14 bp, Artificial sequence
  Synthetic oligonucleotide
catcacaaaataac

SEQ ID NO: 808 - DNA, 14 bp, Artificial sequence
  Synthetic oligonucleotide
tcatcacaaaataa

SEQ ID NO: 809 - DNA, 14 bp, Artificial sequence
  Synthetic oligonucleotide
ttcatcacaaaata

SEQ ID NO: 810 - DNA, 14 bp, Artificial sequence
  Synthetic oligonucleotide
tttcatcacaaaat

SEQ ID NO: 811 - DNA, 14 bp, Artificial sequence
  Synthetic oligonucleotide
ttttcatcacaaaa

SEQ ID NO: 812 - DNA, 14 bp, Artificial sequence
  Synthetic oligonucleotide
attttcatcacaaa

SEQ ID NO: 813 - DNA, 14 bp, Artificial sequence
  Synthetic oligonucleotide
tattttcatcacaa

SEQ ID NO: 814 - DNA, 14 bp, Artificial sequence
  Synthetic oligonucleotide
gtattttcatcaca

SEQ ID NO: 815 - DNA, 14 bp, Artificial sequence
  Synthetic oligonucleotide
atttaaatttatca

SEQ ID NO: 816 - DNA, 14 bp, Artificial sequence
  Synthetic oligonucleotide
aatttaaatttatc

SEQ ID NO: 817 - DNA, 14 bp, Artificial sequence
  Synthetic oligonucleotide
aaatttaaatttat

SEQ ID NO: 818 - DNA, 14 bp, Artificial sequence
  Synthetic oligonucleotide
aaaatttaaattta

SEQ ID NO: 819 - DNA, 14 bp, Artificial sequence
  Synthetic oligonucleotide
taaaatttaaattt

SEQ ID NO: 820 - DNA, 14 bp, Artificial sequence
  Synthetic oligonucleotide
ataaaatttaaatt

SEQ ID NO: 821 - DNA, 14 bp, Artificial sequence
  Synthetic oligonucleotide
cataaaatttaaat

SEQ ID NO: 822 - DNA, 14 bp, Artificial sequence
  Synthetic oligonucleotide
acataaaatttaaa

SEQ ID NO: 823 - DNA, 14 bp, Artificial sequence
  Synthetic oligonucleotide
ctactaatattcat

SEQ ID NO: 824 - DNA, 14 bp, Artificial sequence
  Synthetic oligonucleotide
cctactaatattca

SEQ ID NO: 825 - DNA, 14 bp, Artificial sequence
  Synthetic oligonucleotide
acctactaatattc

SEQ ID NO: 826 - DNA, 14 bp, Artificial sequence
  Synthetic oligonucleotide
cacctactaatatt

SEQ ID NO: 827 - DNA, 14 bp, Artificial sequence
  Synthetic oligonucleotide
tcacctactaatat

SEQ ID NO: 828 - DNA, 14 bp, Artificial sequence
  Synthetic oligonucleotide
ttcacctactaata

SEQ ID NO: 829 - DNA, 14 bp, Artificial sequence
  Synthetic oligonucleotide
tttcacctactaat

SEQ ID NO: 830 - DNA, 14 bp, Artificial sequence
  Synthetic oligonucleotide
ttttcacctactaa

SEQ ID NO: 831 - DNA, 14 bp, Artificial sequence
  Synthetic oligonucleotide
tttttcacctacta

SEQ ID NO: 832 - DNA, 14 bp, Artificial sequence
  Synthetic oligonucleotide
atttttcacctact

SEQ ID NO: 833 - DNA, 14 bp, Artificial sequence
  Synthetic oligonucleotide
tatttttcacctac

SEQ ID NO: 834 - DNA, 14 bp, Artificial sequence
  Synthetic oligonucleotide
ttatttttcaccta

SEQ ID NO: 835 - DNA, 14 bp, Artificial sequence
  Synthetic oligonucleotide
tttatttttcacct

SEQ ID NO: 836 - DNA, 14 bp, Artificial sequence
  Synthetic oligonucleotide
ttctactactaatt

SEQ ID NO: 837 - DNA, 14 bp, Artificial sequence
  Synthetic oligonucleotide
cttctactactaat

SEQ ID NO: 838 - DNA, 14 bp, Artificial sequence
  Synthetic oligonucleotide
acttctactactaa

SEQ ID NO: 839 - DNA, 14 bp, Artificial sequence
  Synthetic oligonucleotide
aacttctactacta

SEQ ID NO: 840 - DNA, 14 bp, Artificial sequence
  Synthetic oligonucleotide
caacttctactact

SEQ ID NO: 841 - DNA, 14 bp, Artificial sequence
  Synthetic oligonucleotide
tcaacttctactac

SEQ ID NO: 842 - DNA, 14 bp, Artificial sequence
  Synthetic oligonucleotide
ctcaacttctacta

SEQ ID NO: 843 - DNA, 14 bp, Artificial sequence
  Synthetic oligonucleotide
tctcaacttctact

SEQ ID NO: 844 - DNA, 14 bp, Artificial sequence
  Synthetic oligonucleotide
ctctcaacttctac

SEQ ID NO: 845 - DNA, 14 bp, Artificial sequence
  Synthetic oligonucleotide
tctctcaacttcta

SEQ ID NO: 846 - DNA, 14 bp, Artificial sequence
  Synthetic oligonucleotide
ttctctcaacttct

SEQ ID NO: 847 - DNA, 14 bp, Artificial sequence
  Synthetic oligonucleotide
tttctctcaacttc

SEQ ID NO: 848 - DNA, 14 bp, Artificial sequence
  Synthetic oligonucleotide
ttttctctcaactt

SEQ ID NO: 849 - DNA, 14 bp, Artificial sequence
  Synthetic oligonucleotide
tttttctctcaact

SEQ ID NO: 850 - DNA, 14 bp, Artificial sequence
  Synthetic oligonucleotide
ctttttctctcaac

SEQ ID NO: 851 - DNA, 14 bp, Artificial sequence
  Synthetic oligonucleotide
actttttctctcaa

SEQ ID NO: 852 - DNA, 14 bp, Artificial sequence
  Synthetic oligonucleotide
tactttttctctca

SEQ ID NO: 853 - DNA, 14 bp, Artificial sequence
  Synthetic oligonucleotide
ttactttttctctc

SEQ ID NO: 854 - DNA, 14 bp, Artificial sequence
  Synthetic oligonucleotide
gttactttttctct

SEQ ID NO: 855 - DNA, 14 bp, Artificial sequence
  Synthetic oligonucleotide
agttactttttctc

SEQ ID NO: 856 - DNA, 14 bp, Artificial sequence
  Synthetic oligonucleotide
cattcccattaaca

SEQ ID NO: 857 - DNA, 14 bp, Artificial sequence
  Synthetic oligonucleotide
acattcccattaac

SEQ ID NO: 858 - DNA, 14 bp, Artificial sequence
  Synthetic oligonucleotide
tacattcccattaa

SEQ ID NO: 859 - DNA, 14 bp, Artificial sequence
  Synthetic oligonucleotide
ttacattcccatta

SEQ ID NO: 860 - DNA, 14 bp, Artificial sequence
  Synthetic oligonucleotide
tttacattcccatt

SEQ ID NO: 861 - DNA, 14 bp, Artificial sequence
  Synthetic oligonucleotide
ttttacattcccat

SEQ ID NO: 862 - DNA, 14 bp, Artificial sequence
  Synthetic oligonucleotide
cttttacattccca

SEQ ID NO: 863 - DNA, 14 bp, Artificial sequence
  Synthetic oligonucleotide
acttttacattccc

SEQ ID NO: 864 - DNA, 14 bp, Artificial sequence
  Synthetic oligonucleotide
cacttttacattcc

SEQ ID NO: 865 - DNA, 14 bp, Artificial sequence
  Synthetic oligonucleotide
acacttttacattc

SEQ ID NO: 866 - DNA, 14 bp, Artificial sequence
  Synthetic oligonucleotide
tacacttttacatt

SEQ ID NO: 867 - DNA, 14 bp, Artificial sequence
  Synthetic oligonucleotide
gtacacttttacat

SEQ ID NO: 868 - DNA, 14 bp, Artificial sequence
  Synthetic oligonucleotide
tgtacacttttaca

SEQ ID NO: 869 - DNA, 14 bp, Artificial sequence
  Synthetic oligonucleotide
tttatcaaaaaaat

SEQ ID NO: 870 - DNA, 14 bp, Artificial sequence
  Synthetic oligonucleotide
atttatcaaaaaaa

SEQ ID NO: 871 - DNA, 14 bp, Artificial sequence
  Synthetic oligonucleotide
catttatcaaaaaa

SEQ ID NO: 872 - DNA, 14 bp, Artificial sequence
  Synthetic oligonucleotide
acatttatcaaaaa

SEQ ID NO: 873 - DNA, 14 bp, Artificial sequence
  Synthetic oligonucleotide
tacatttatcaaaa

SEQ ID NO: 874 - DNA, 14 bp, Artificial sequence
  Synthetic oligonucleotide
atacatttatcaaa

SEQ ID NO: 875 - DNA, 14 bp, Artificial sequence
  Synthetic oligonucleotide
tatacatttatcaa

SEQ ID NO: 876 - DNA, 14 bp, Artificial sequence
  Synthetic oligonucleotide
acatcttccaattt

SEQ ID NO: 877 - DNA, 14 bp, Artificial sequence
  Synthetic oligonucleotide
tacatcttccaatt

SEQ ID NO: 878 - DNA, 14 bp, Artificial sequence
  Synthetic oligonucleotide
ttacatcttccaat

SEQ ID NO: 879 - DNA, 14 bp, Artificial sequence
  Synthetic oligonucleotide
tttacatcttccaa

SEQ ID NO: 880 - DNA, 14 bp, Artificial sequence
  Synthetic oligonucleotide
atttacatcttcca

SEQ ID NO: 881 - DNA, 14 bp, Artificial sequence
  Synthetic oligonucleotide
tatttacatcttcc

SEQ ID NO: 882 - DNA, 14 bp, Artificial sequence
  Synthetic oligonucleotide
ttatttacatcttc

SEQ ID NO: 883 - DNA, 14 bp, Artificial sequence
  Synthetic oligonucleotide
cttatttacatctt

SEQ ID NO: 884 - DNA, 14 bp, Artificial sequence
  Synthetic oligonucleotide
tcttatttacatct

SEQ ID NO: 885 - DNA, 14 bp, Artificial sequence
  Synthetic oligonucleotide
atcttatttacatc

SEQ ID NO: 886 - DNA, 14 bp, Artificial sequence
  Synthetic oligonucleotide
aatcttatttacat

SEQ ID NO: 887 - DNA, 14 bp, Artificial sequence
  Synthetic oligonucleotide
gaatcttatttaca

SEQ ID NO: 888 - DNA, 14 bp, Artificial sequence
  Synthetic oligonucleotide
tgaatcttatttac

SEQ ID NO: 889 - DNA, 14 bp, Artificial sequence
  Synthetic oligonucleotide
ttcccttcactcct

SEQ ID NO: 890 - DNA, 14 bp, Artificial sequence
  Synthetic oligonucleotide
tttcccttcactcc

SEQ ID NO: 891 - DNA, 14 bp, Artificial sequence
  Synthetic oligonucleotide
ttttcccttcactc

SEQ ID NO: 892 - DNA, 14 bp, Artificial sequence
  Synthetic oligonucleotide
attttcccttcact

SEQ ID NO: 893 - DNA, 14 bp, Artificial sequence
  Synthetic oligonucleotide
aattttcccttcac

SEQ ID NO: 894 - DNA, 14 bp, Artificial sequence
  Synthetic oligonucleotide
taattttcccttca

SEQ ID NO: 895 - DNA, 14 bp, Artificial sequence
  Synthetic oligonucleotide
ttaattttcccttc

SEQ ID NO: 896 - DNA, 14 bp, Artificial sequence
  Synthetic oligonucleotide
gttaattttccctt

SEQ ID NO: 897 - DNA, 14 bp, Artificial sequence
  Synthetic oligonucleotide
tttatcatttcttt

SEQ ID NO: 898 - DNA, 14 bp, Artificial sequence
  Synthetic oligonucleotide
ttttatcatttctt

SEQ ID NO: 899 - DNA, 14 bp, Artificial sequence
  Synthetic oligonucleotide
cttttatcatttct

SEQ ID NO: 900 - DNA, 14 bp, Artificial sequence
  Synthetic oligonucleotide
tcttttatcatttc

SEQ ID NO: 901 - DNA, 14 bp, Artificial sequence
  Synthetic oligonucleotide
ttcttttatcattt

SEQ ID NO: 902 - DNA, 14 bp, Artificial sequence
  Synthetic oligonucleotide
cttcttttatcatt

SEQ ID NO: 903 - DNA, 14 bp, Artificial sequence
  Synthetic oligonucleotide
acttcttttatcat

SEQ ID NO: 904 - DNA, 14 bp, Artificial sequence
  Synthetic oligonucleotide
tacttcttttatca

SEQ ID NO: 905 - DNA, 14 bp, Artificial sequence
  Synthetic oligonucleotide
ttacttcttttatc

SEQ ID NO: 906 - DNA, 14 bp, Artificial sequence
  Synthetic oligonucleotide
attacttcttttat

SEQ ID NO: 907 - DNA, 14 bp, Artificial sequence
  Synthetic oligonucleotide
aattacttctttta

SEQ ID NO: 908 - DNA, 14 bp, Artificial sequence
  Synthetic oligonucleotide
aaattacttctttt

SEQ ID NO: 909 - DNA, 14 bp, Artificial sequence
  Synthetic oligonucleotide
aaaattacttcttt

SEQ ID NO: 910 - DNA, 14 bp, Artificial sequence
  Synthetic oligonucleotide
caaaattacttctt

SEQ ID NO: 911 - DNA, 14 bp, Artificial sequence
  Synthetic oligonucleotide
ccaaaattacttct

SEQ ID NO: 912 - DNA, 14 bp, Artificial sequence
  Synthetic oligonucleotide
tccaaaattacttc

SEQ ID NO: 913 - DNA, 14 bp, Artificial sequence
  Synthetic oligonucleotide
ttccaaaattactt

SEQ ID NO: 914 - DNA, 14 bp, Artificial sequence
  Synthetic oligonucleotide
gttccaaaattact

SEQ ID NO: 915 - DNA, 14 bp, Artificial sequence
  Synthetic oligonucleotide
tgttccaaaattac

SEQ ID NO: 916 - DNA, 14 bp, Artificial sequence
  Synthetic oligonucleotide
atgttccaaaatta

SEQ ID NO: 917 - DNA, 14 bp, Artificial sequence
  Synthetic oligonucleotide
ttactctttttatt

SEQ ID NO: 918 - DNA, 14 bp, Artificial sequence
  Synthetic oligonucleotide
tttactctttttat

SEQ ID NO: 919 - DNA, 14 bp, Artificial sequence
  Synthetic oligonucleotide
ttttactcttttta

SEQ ID NO: 920 - DNA, 14 bp, Artificial sequence
  Synthetic oligonucleotide
attttactcttttt

SEQ ID NO: 921 - DNA, 14 bp, Artificial sequence
  Synthetic oligonucleotide
tattttactctttt

SEQ ID NO: 922 - DNA, 14 bp, Artificial sequence
  Synthetic oligonucleotide
atattttactcttt

SEQ ID NO: 923 - DNA, 14 bp, Artificial sequence
  Synthetic oligonucleotide
catattttactctt

SEQ ID NO: 924 - DNA, 14 bp, Artificial sequence
  Synthetic oligonucleotide
ccatattttactct

SEQ ID NO: 925 - DNA, 14 bp, Artificial sequence
  Synthetic oligonucleotide
cccatattttactc

SEQ ID NO: 926 - DNA, 14 bp, Artificial sequence
  Synthetic oligonucleotide
acccatattttact

SEQ ID NO: 927 - DNA, 14 bp, Artificial sequence
  Synthetic oligonucleotide
tacccatattttac

SEQ ID NO: 928 - DNA, 14 bp, Artificial sequence
  Synthetic oligonucleotide
ttacccatatttta

SEQ ID NO: 929 - DNA, 14 bp, Artificial sequence
  Synthetic oligonucleotide
tttacccatatttt

SEQ ID NO: 930 - DNA, 14 bp, Artificial sequence
  Synthetic oligonucleotide
gtttacccatattt

SEQ ID NO: 931 - DNA, 14 bp, Artificial sequence
  Synthetic oligonucleotide
tgtttacccatatt

SEQ ID NO: 932 - DNA, 14 bp, Artificial sequence
  Synthetic oligonucleotide
gttacctcccttta

SEQ ID NO: 933 - DNA, 14 bp, Artificial sequence
  Synthetic oligonucleotide
ggttacctcccttt

SEQ ID NO: 934 - DNA, 14 bp, Artificial sequence
  Synthetic oligonucleotide
aggttacctccctt

SEQ ID NO: 935 - DNA, 14 bp, Artificial sequence
  Synthetic oligonucleotide
caaactaaaaccta

SEQ ID NO: 936 - DNA, 14 bp, Artificial sequence
  Synthetic oligonucleotide
tcaaactaaaacct

SEQ ID NO: 937 - DNA, 14 bp, Artificial sequence
  Synthetic oligonucleotide
atcaaactaaaacc

SEQ ID NO: 938 - DNA, 14 bp, Artificial sequence
  Synthetic oligonucleotide
gatcaaactaaaac

SEQ ID NO: 939 - DNA, 14 bp, Artificial sequence
  Synthetic oligonucleotide
agatcaaactaaaa

SEQ ID NO: 940 - DNA, 14 bp, Artificial sequence
  Synthetic oligonucleotide
aagatcaaactaaa

SEQ ID NO: 941 - DNA, 14 bp, Artificial sequence
  Synthetic oligonucleotide
ccaatttcacccaa

SEQ ID NO: 942 - DNA, 14 bp, Artificial sequence
  Synthetic oligonucleotide
cccaatttcaccca

SEQ ID NO: 943 - DNA, 14 bp, Artificial sequence
  Synthetic oligonucleotide
gcccaatttcaccc

SEQ ID NO: 944 - DNA, 14 bp, Artificial sequence
  Synthetic oligonucleotide
tgcccaatttcacc

SEQ ID NO: 945 - DNA, 14 bp, Artificial sequence
  Synthetic oligonucleotide
ttgcccaatttcac

SEQ ID NO: 946 - DNA, 14 bp, Artificial sequence
  Synthetic oligonucleotide
caactttctatttt

SEQ ID NO: 947 - DNA, 14 bp, Artificial sequence
  Synthetic oligonucleotide
ccaactttctattt

SEQ ID NO: 948 - DNA, 14 bp, Artificial sequence
  Synthetic oligonucleotide
cccaactttctatt

SEQ ID NO: 949 - DNA, 14 bp, Artificial sequence
  Synthetic oligonucleotide
acccaactttctat

SEQ ID NO: 950 - DNA, 14 bp, Artificial sequence
  Synthetic oligonucleotide
aacccaactttcta

SEQ ID NO: 951 - DNA, 14 bp, Artificial sequence
  Synthetic oligonucleotide
aaacccaactttct

SEQ ID NO: 952 - DNA, 14 bp, Artificial sequence
  Synthetic oligonucleotide
aaaacccaactttc

SEQ ID NO: 953 - DNA, 14 bp, Artificial sequence
  Synthetic oligonucleotide
aaaaacccaacttt

SEQ ID NO: 954 - DNA, 14 bp, Artificial sequence
  Synthetic oligonucleotide
caaaaacccaactt

SEQ ID NO: 955 - DNA, 14 bp, Artificial sequence
  Synthetic oligonucleotide
acaaaaacccaact

SEQ ID NO: 956 - DNA, 14 bp, Artificial sequence
  Synthetic oligonucleotide
ctttaaaatttcca

SEQ ID NO: 957 - DNA, 14 bp, Artificial sequence
  Synthetic oligonucleotide
tctttaaaatttcc

SEQ ID NO: 958 - DNA, 14 bp, Artificial sequence
  Synthetic oligonucleotide
ttctttaaaatttc

SEQ ID NO: 959 - DNA, 14 bp, Artificial sequence
  Synthetic oligonucleotide
tttctttaaaattt

SEQ ID NO: 960 - DNA, 14 bp, Artificial sequence
  Synthetic oligonucleotide
atttctttaaaatt

SEQ ID NO: 961 - DNA, 14 bp, Artificial sequence
  Synthetic oligonucleotide
catttctttaaaat

SEQ ID NO: 962 - DNA, 14 bp, Artificial sequence
  Synthetic oligonucleotide
acatttctttaaaa

SEQ ID NO: 963 - DNA, 14 bp, Artificial sequence
  Synthetic oligonucleotide
cacatttctttaaa

SEQ ID NO: 964 - DNA, 14 bp, Artificial sequence
  Synthetic oligonucleotide
ccacatttctttaa

SEQ ID NO: 965 - DNA, 14 bp, Artificial sequence
  Synthetic oligonucleotide
accacatttcttta

SEQ ID NO: 966 - DNA, 14 bp, Artificial sequence
  Synthetic oligonucleotide
aaccacatttcttt

SEQ ID NO: 967 - DNA, 14 bp, Artificial sequence
  Synthetic oligonucleotide
aaaccacatttctt

SEQ ID NO: 968 - DNA, 14 bp, Artificial sequence
  Synthetic oligonucleotide
aaaaccacatttct

SEQ ID NO: 969 - DNA, 14 bp, Artificial sequence
  Synthetic oligonucleotide
caaaaccacatttc

SEQ ID NO: 970 - DNA, 14 bp, Artificial sequence
  Synthetic oligonucleotide
ttcttctcttttca

SEQ ID NO: 971 - DNA, 14 bp, Artificial sequence
  Synthetic oligonucleotide
tttcttctcttttc

SEQ ID NO: 972 - DNA, 14 bp, Artificial sequence
  Synthetic oligonucleotide
ttttcttctctttt

SEQ ID NO: 973 - DNA, 14 bp, Artificial sequence
  Synthetic oligonucleotide
tttttcttctcttt

SEQ ID NO: 974 - DNA, 14 bp, Artificial sequence
  Synthetic oligonucleotide
ttttttcttctctt

SEQ ID NO: 975 - DNA, 14 bp, Artificial sequence
  Synthetic oligonucleotide
attttttcttctct

SEQ ID NO: 976 - DNA, 14 bp, Artificial sequence
  Synthetic oligonucleotide
tattttttcttctc

SEQ ID NO: 977 - DNA, 14 bp, Artificial sequence
  Synthetic oligonucleotide
aacttaatattaaa

SEQ ID NO: 978 - DNA, 14 bp, Artificial sequence
  Synthetic oligonucleotide
caacttaatattaa

SEQ ID NO: 979 - DNA, 14 bp, Artificial sequence
  Synthetic oligonucleotide
tcaacttaatatta

SEQ ID NO: 980 - DNA, 14 bp, Artificial sequence
  Synthetic oligonucleotide
ttcaacttaatatt

SEQ ID NO: 981 - DNA, 14 bp, Artificial sequence
  Synthetic oligonucleotide
attcaacttaatat

SEQ ID NO: 982 - DNA, 14 bp, Artificial sequence
  Synthetic oligonucleotide
tattcaacttaata

SEQ ID NO: 983 - DNA, 14 bp, Artificial sequence
  Synthetic oligonucleotide
ttattcaacttaat

SEQ ID NO: 984 - DNA, 14 bp, Artificial sequence
  Synthetic oligonucleotide
tttattcaacttaa

SEQ ID NO: 985 - DNA, 14 bp, Artificial sequence
  Synthetic oligonucleotide
caaattaaaaaaca

SEQ ID NO: 986 - DNA, 14 bp, Artificial sequence
  Synthetic oligonucleotide
tcaaattaaaaaac

SEQ ID NO: 987 - DNA, 14 bp, Artificial sequence
  Synthetic oligonucleotide
ttcaaattaaaaaa

SEQ ID NO: 988 - DNA, 14 bp, Artificial sequence
  Synthetic oligonucleotide
cttcaaattaaaaa

SEQ ID NO: 989 - DNA, 14 bp, Artificial sequence
  Synthetic oligonucleotide
tcttcaaattaaaa

SEQ ID NO: 990 - DNA, 14 bp, Artificial sequence
  Synthetic oligonucleotide
ttcttcaaattaaa

SEQ ID NO: 991 - DNA, 14 bp, Artificial sequence
  Synthetic oligonucleotide
tttcttcaaattaa

SEQ ID NO: 992 - DNA, 14 bp, Artificial sequence
  Synthetic oligonucleotide
aacacaaattcaaa

SEQ ID NO: 993 - DNA, 14 bp, Artificial sequence
  Synthetic oligonucleotide
aaacacaaattcaa

SEQ ID NO: 994 - DNA, 14 bp, Artificial sequence
  Synthetic oligonucleotide
taaacacaaattca

SEQ ID NO: 995 - DNA, 14 bp, Artificial sequence
  Synthetic oligonucleotide
ataaacacaaattc

SEQ ID NO: 996 - DNA, 14 bp, Artificial sequence
  Synthetic oligonucleotide
aataaacacaaatt

SEQ ID NO: 997 - DNA, 14 bp, Artificial sequence
  Synthetic oligonucleotide
caataaacacaaat

SEQ ID NO: 998 - DNA, 14 bp, Artificial sequence
  Synthetic oligonucleotide
acaataaacacaaa

SEQ ID NO: 999 - DNA, 14 bp, Artificial sequence
  Synthetic oligonucleotide
aacaataaacacaa

SEQ ID NO: 1000 - DNA, 14 bp, Artificial sequence
  Synthetic oligonucleotide
taacaataaacaca

SEQ ID NO: 1001 - DNA, 14 bp, Artificial sequence
  Synthetic oligonucleotide
ttaacaataaacac

SEQ ID NO: 1002 - DNA, 14 bp, Artificial sequence
  Synthetic oligonucleotide
attaacaataaaca

SEQ ID NO: 1003 - DNA, 14 bp, Artificial sequence
  Synthetic oligonucleotide
aattaacaataaac

SEQ ID NO: 1004 - DNA, 14 bp, Artificial sequence
  Synthetic oligonucleotide
gaattaacaataaa

SEQ ID NO: 1005 - DNA, 14 bp, Artificial sequence
  Synthetic oligonucleotide
tgaattaacaataa

SEQ ID NO: 1006 - DNA, 14 bp, Artificial sequence
  Synthetic oligonucleotide
atattcctcaatca

SEQ ID NO: 1007 - DNA, 14 bp, Artificial sequence
  Synthetic oligonucleotide
tatattcctcaatc

SEQ ID NO: 1008 - DNA, 14 bp, Artificial sequence
  Synthetic oligonucleotide
atatattcctcaat

SEQ ID NO: 1009 - DNA, 14 bp, Artificial sequence
  Synthetic oligonucleotide
aatatattcctcaa

SEQ ID NO: 1010 - DNA, 14 bp, Artificial sequence
  Synthetic oligonucleotide
caatatattcctca

SEQ ID NO: 1011 - DNA, 14 bp, Artificial sequence
  Synthetic oligonucleotide
acaatatattcctc

SEQ ID NO: 1012 - DNA, 14 bp, Artificial sequence
  Synthetic oligonucleotide
gacaatatattcct

SEQ ID NO: 1013 - DNA, 14 bp, Artificial sequence
  Synthetic oligonucleotide
caatcctaattaaa

SEQ ID NO: 1014 - DNA, 14 bp, Artificial sequence
  Synthetic oligonucleotide
ccaatcctaattaa

SEQ ID NO: 1015 - DNA, 14 bp, Artificial sequence
  Synthetic oligonucleotide
cccaatcctaatta

SEQ ID NO: 1016 - DNA, 14 bp, Artificial sequence
  Synthetic oligonucleotide
gcccaatcctaatt

SEQ ID NO: 1017 - DNA, 14 bp, Artificial sequence
  Synthetic oligonucleotide
tgcccaatcctaat

SEQ ID NO: 1018 - DNA, 14 bp, Artificial sequence
  Synthetic oligonucleotide
accctacaaatact

SEQ ID NO: 1019 - DNA, 14 bp, Artificial sequence
  Synthetic oligonucleotide
aaccctacaaatac

SEQ ID NO: 1020 - DNA, 14 bp, Artificial sequence
  Synthetic oligonucleotide
aaaccctacaaata

SEQ ID NO: 1021 - DNA, 14 bp, Artificial sequence
  Synthetic oligonucleotide
aaaaccctacaaat

SEQ ID NO: 1022 - DNA, 14 bp, Artificial sequence
  Synthetic oligonucleotide
aaaaaccctacaaa

SEQ ID NO: 1023 - DNA, 14 bp, Artificial sequence
  Synthetic oligonucleotide
aaaaaaccctacaa

SEQ ID NO: 1024 - DNA, 14 bp, Artificial sequence
  Synthetic oligonucleotide
aaaaaaaccctaca

SEQ ID NO: 1025 - DNA, 14 bp, Artificial sequence
  Synthetic oligonucleotide
tatacactattaat

SEQ ID NO: 1026 - DNA, 14 bp, Artificial sequence
  Synthetic oligonucleotide
ttatacactattaa

SEQ ID NO: 1027 - DNA, 14 bp, Artificial sequence
  Synthetic oligonucleotide
attatacactatta

SEQ ID NO: 1028 - DNA, 14 bp, Artificial sequence
  Synthetic oligonucleotide
aattatacactatt

SEQ ID NO: 1029 - DNA, 14 bp, Artificial sequence
  Synthetic oligonucleotide
gaattatacactat

SEQ ID NO: 1030 - DNA, 14 bp, Artificial sequence
  Synthetic oligonucleotide
gtaacaattataca

SEQ ID NO: 1031 - DNA, 14 bp, Artificial sequence
  Synthetic oligonucleotide
tgtaacaattatac

SEQ ID NO: 1032 - DNA, 14 bp, Artificial sequence
  Synthetic oligonucleotide
ctgtaacaattata

SEQ ID NO: 1033 - DNA, 14 bp, Artificial sequence
  Synthetic oligonucleotide
cctgtaacaattat

SEQ ID NO: 1034 - DNA, 14 bp, Artificial sequence
  Synthetic oligonucleotide
tcctgtaacaatta

SEQ ID NO: 1035 - DNA, 14 bp, Artificial sequence
  Synthetic oligonucleotide
ataaaaaccacctt

SEQ ID NO: 1036 - DNA, 14 bp, Artificial sequence
  Synthetic oligonucleotide
aataaaaaccacct

SEQ ID NO: 1037 - DNA, 14 bp, Artificial sequence
  Synthetic oligonucleotide
gaataaaaaccacc

SEQ ID NO: 1038 - DNA, 14 bp, Artificial sequence
  Synthetic oligonucleotide
agaataaaaaccac

SEQ ID NO: 1039 - DNA, 14 bp, Artificial sequence
  Synthetic oligonucleotide
cagaataaaaacca

SEQ ID NO: 1040 - DNA, 14 bp, Artificial sequence
  Synthetic oligonucleotide
ccagaataaaaacc

SEQ ID NO: 1041 - DNA, 14 bp, Artificial sequence
  Synthetic oligonucleotide
cccagaataaaaac

SEQ ID NO: 1042 - DNA, 14 bp, Artificial sequence
  Synthetic oligonucleotide
acccagaataaaaa

SEQ ID NO: 1043 - DNA, 14 bp, Artificial sequence
  Synthetic oligonucleotide
tttcttactcccct

SEQ ID NO: 1044 - DNA, 14 bp, Artificial sequence
  Synthetic oligonucleotide
ctttcttactcccc

SEQ ID NO: 1045 - DNA, 14 bp, Artificial sequence
  Synthetic oligonucleotide
actttcttactccc

SEQ ID NO: 1046 - DNA, 14 bp, Artificial sequence
  Synthetic oligonucleotide
cactttcttactcc

SEQ ID NO: 1047 - DNA, 14 bp, Artificial sequence
  Synthetic oligonucleotide
ccactttcttactc

SEQ ID NO: 1048 - DNA, 14 bp, Artificial sequence
  Synthetic oligonucleotide
cctttaccactttt

SEQ ID NO: 1049 - DNA, 14 bp, Artificial sequence
  Synthetic oligonucleotide
ccctttaccacttt

SEQ ID NO: 1050 - DNA, 14 bp, Artificial sequence
  Synthetic oligonucleotide
tccctttaccactt

SEQ ID NO: 1051 - DNA, 14 bp, Artificial sequence
  Synthetic oligonucleotide
atccctttaccact

SEQ ID NO: 1052 - DNA, 14 bp, Artificial sequence
  Synthetic oligonucleotide
catccctttaccac

SEQ ID NO: 1053 - DNA, 14 bp, Artificial sequence
  Synthetic oligonucleotide
ctacatctaacccc

SEQ ID NO: 1054 - DNA, 14 bp, Artificial sequence
  Synthetic oligonucleotide
tctacatctaaccc

SEQ ID NO: 1055 - DNA, 14 bp, Artificial sequence
  Synthetic oligonucleotide
gtctacatctaacc

SEQ ID NO: 1056 - DNA, 14 bp, Artificial sequence
  Synthetic oligonucleotide
agtctacatctaac

SEQ ID NO: 1057 - DNA, 14 bp, Artificial sequence
  Synthetic oligonucleotide
cagtctacatctaa

SEQ ID NO: 1058 - DNA, 14 bp, Artificial sequence
  Synthetic oligonucleotide
tcagtctacatcta

SEQ ID NO: 1059 - DNA, 14 bp, Artificial sequence
  Synthetic oligonucleotide
ttcagtctacatct

SEQ ID NO: 1060 - DNA, 14 bp, Artificial sequence
  Synthetic oligonucleotide
taaccacacctcct

SEQ ID NO: 1061 - DNA, 14 bp, Artificial sequence
  Synthetic oligonucleotide
ttaaccacacctcc

SEQ ID NO: 1062 - DNA, 14 bp, Artificial sequence
  Synthetic oligonucleotide
tttaaccacacctc

SEQ ID NO: 1063 - DNA, 14 bp, Artificial sequence
  Synthetic oligonucleotide
ttttaaccacacct

SEQ ID NO: 1064 - DNA, 14 bp, Artificial sequence
  Synthetic oligonucleotide
gttttaaccacacc

SEQ ID NO: 1065 - DNA, 14 bp, Artificial sequence
  Synthetic oligonucleotide
agttttaaccacac

SEQ ID NO: 1066 - DNA, 14 bp, Artificial sequence
  Synthetic oligonucleotide
caacaaaacatcaa

SEQ ID NO: 1067 - DNA, 14 bp, Artificial sequence
  Synthetic oligonucleotide
tcaacaaaacatca

SEQ ID NO: 1068 - DNA, 14 bp, Artificial sequence
  Synthetic oligonucleotide
ttcaacaaaacatc

SEQ ID NO: 1069 - DNA, 14 bp, Artificial sequence
  Synthetic oligonucleotide
tttcaacaaaacat

SEQ ID NO: 1070 - DNA, 14 bp, Artificial sequence
  Synthetic oligonucleotide
ttttcaacaaaaca

SEQ ID NO: 1071 - DNA, 14 bp, Artificial sequence
  Synthetic oligonucleotide
gttttcaacaaaac

SEQ ID NO: 1072 - DNA, 14 bp, Artificial sequence
  Synthetic oligonucleotide
tgttttcaacaaaa

SEQ ID NO: 1073 - DNA, 14 bp, Artificial sequence
  Synthetic oligonucleotide
ttctaaaacttacc

SEQ ID NO: 1074 - DNA, 14 bp, Artificial sequence
  Synthetic oligonucleotide
tttctaaaacttac

SEQ ID NO: 1075 - DNA, 14 bp, Artificial sequence
  Synthetic oligonucleotide
ctttctaaaactta

SEQ ID NO: 1076 - DNA, 14 bp, Artificial sequence
  Synthetic oligonucleotide
tctttctaaaactt

SEQ ID NO: 1077 - DNA, 14 bp, Artificial sequence
  Synthetic oligonucleotide
atctttctaaaact

SEQ ID NO: 1078 - DNA, 14 bp, Artificial sequence
  Synthetic oligonucleotide
aatctttctaaaac

SEQ ID NO: 1079 - DNA, 14 bp, Artificial sequence
  Synthetic oligonucleotide
gaatctttctaaaa

SEQ ID NO: 1080 - DNA, 14 bp, Artificial sequence
  Synthetic oligonucleotide
agaatctttctaaa

SEQ ID NO: 1081 - DNA, 14 bp, Artificial sequence
  Synthetic oligonucleotide
cagaatctttctaa

SEQ ID NO: 1082 - DNA, 14 bp, Artificial sequence
  Synthetic oligonucleotide
cctttatttccctt

SEQ ID NO: 1083 - DNA, 14 bp, Artificial sequence
  Synthetic oligonucleotide
ccctttatttccct

SEQ ID NO: 1084 - DNA, 14 bp, Artificial sequence
  Synthetic oligonucleotide
tccctttatttccc

SEQ ID NO: 1085 - DNA, 14 bp, Artificial sequence
  Synthetic oligonucleotide
ttccctttatttcc

SEQ ID NO: 1086 - DNA, 14 bp, Artificial sequence
  Synthetic oligonucleotide
tttccctttatttc

SEQ ID NO: 1087 - DNA, 14 bp, Artificial sequence
  Synthetic oligonucleotide
atttccctttattt

SEQ ID NO: 1088 - DNA, 14 bp, Artificial sequence
  Synthetic oligonucleotide
tatttccctttatt

SEQ ID NO: 1089 - DNA, 14 bp, Artificial sequence
  Synthetic oligonucleotide
gtatttccctttat

SEQ ID NO: 1090 - DNA, 27 bp, Artificial
  Probe
ctgaacagcctccttggtcttcttgta

SEQ ID NO: 1091 - DNA, 21 bp, artificial
  Primer
cttgccagctctcattctctg

SEQ ID NO: 1092 - DNA, 21 bp, Artificial
  Primer
tggtggttgaagataaggttg

SEQ ID NO: 1093 - DNA, 17 bp, Homo sapiens
aagagtaaaatatgggt

SEQ ID NO: 1094 - DNA, 18 bp, Homo sapiens
gaatgtaaaagtgtacag

SEQ ID NO: 1095 - DNA, 18 bp, Homo sapiens
ggaatgtaaaagtgtaca

SEQ ID NO: 1096 - DNA, 18 bp, Homo sapiens
gggaatgtaaaagtgtac

SEQ ID NO: 1097 - DNA, 19 bp, Homo sapiens
ttgatggtataatgaagaa

SEQ ID NO: 1098 - DNA, 19 bp, Homo sapiens
ggaagatgtaaataagatt

SEQ ID NO: 1099 - DNA, 18 bp, Artificial sequence
  Synthetic oligonucleotide
ccaaaagaaaccaaaccc

SEQ ID NO: 1100 - DNA, 19 bp, Artificial sequence
  Synthetic oligonucleotide
ccccattcaaatatttatt

SEQ ID NO: 1101 - DNA, 17 bp, Artificial sequence
  Synthetic oligonucleotide
aatcatttacccccaac

SEQ ID NO: 1102 - DNA, 18 bp, Artificial sequence
  Synthetic oligonucleotide
tatctcaaactatcccca

SEQ ID NO: 1103 - DNA, 18 bp, Artificial sequence
  Synthetic oligonucleotide
tctattccttaacccaac

SEQ ID NO: 1104 - DNA, 20 bp, Artificial sequence
  Synthetic oligonucleotide
tcccctaaataatttaatca

SEQ ID NO: 1105 - DNA, 17 bp, Artificial sequence
  Synthetic oligonucleotide
aaaccactccattccaa

SEQ ID NO: 1106 - DNA, 19 bp, Artificial sequence
  Synthetic oligonucleotide
tctaaaccccaaactttca

SEQ ID NO: 1107 - DNA, 19 bp, Artificial sequence
  Synthetic oligonucleotide
ttctaaaccccaaactttc

SEQ ID NO: 1108 - DNA, 18 bp, Artificial sequence
  Synthetic oligonucleotide
agttctaaaccccaaact

SEQ ID NO: 1109 - DNA, 19 bp, Artificial sequence
  Synthetic oligonucleotide
tgaaaccattactacaacc

SEQ ID NO: 1110 - DNA, 20 bp, Artificial sequence
  Synthetic oligonucleotide
acatcatttatcactaccac

SEQ ID NO: 1111 - DNA, 17 bp, Artificial sequence
  Synthetic oligonucleotide
aacattaaaccctccca

SEQ ID NO: 1112 - DNA, 18 bp, Artificial sequence
  Synthetic oligonucleotide
tcagatcctaaaatcact

SEQ ID NO: 1113 - DNA, 19 bp, Artificial sequence
  Synthetic oligonucleotide
ctatacctaaaacaatcta

SEQ ID NO: 1114 - DNA, 18 bp, Artificial sequence
  Synthetic oligonucleotide
tgattcttatacttacta

SEQ ID NO: 1115 - DNA, 20 bp, Artificial sequence
  Synthetic oligonucleotide
taaaaatataactactccta

SEQ ID NO: 1116 - DNA, 20 bp, Artificial sequence
  Synthetic oligonucleotide
tcttcattataccatcaaat

SEQ ID NO: 1117 - DNA, 18 bp, Artificial sequence
  Synthetic oligonucleotide
gtttcatatttttaatcc

SEQ ID NO: 1118 - DNA, 20 bp, Artificial sequence
  Synthetic oligonucleotide
taatatcctcattacccatt

SEQ ID NO: 1119 - DNA, 19 bp, Artificial sequence
  Synthetic oligonucleotide
caaatattcacaaatccta

SEQ ID NO: 1120 - DNA, 20 bp, Artificial sequence
  Synthetic oligonucleotide
catcacaaaataacctatca

SEQ ID NO: 1121 - DNA, 20 bp, Artificial sequence
  Synthetic oligonucleotide
ctctcaacttctactactaa

SEQ ID NO: 1122 - DNA, 19 bp, Artificial sequence
  Synthetic oligonucleotide
aatcttatttacatcttcc

SEQ ID NO: 1123 - DNA, 20 bp, Artificial sequence
  Synthetic oligonucleotide
ccaaaattacttcttttatc

SEQ ID NO: 1124 - DNA, 18 bp, Artificial sequence
  Synthetic oligonucleotide
aacccaactttctatttt

SEQ ID NO: 1125 - DNA, 19 bp, Artificial sequence
  Synthetic oligonucleotide
acaatatattcctcaatca

SEQ ID NO: 1126 - DNA, 17 bp, Artificial sequence
  Synthetic oligonucleotide
cctgtaacaattataca

SEQ ID NO: 1127 - DNA, 17 bp, Artificial sequence
  Synthetic oligonucleotide
catccctttaccacttt

SEQ ID NO: 1128 - DNA, 23 bp, artificial
  Primer
gtttctaaagacatggtcacagc

SEQ ID NO: 1129 - DNA, 23 bp, artificial
  Primer
ctatcaggacagagttcacatcc

SEQ ID NO: 1130 - DNA, 22 bp, artificial
  FAM labelled probe
aaaggccagccaccagttcagg

SEQ ID NO: 1131 - DNA, 25 bp, artificial
  FAM labelled probe
tgatctttgcagtgacccagcatca

SEQ ID NO: 1132 - DNA, 20 bp, artificial
  Primer
gctgtttaacttcgcttccg

SEQ ID NO: 1133 - DNA, 21 bp, artificial
  Primer
cagcaacttcctcaattcctt

SEQ ID NO: 1134 - DNA, 24 bp, artificial
  FAM lebelled probe
ctccgcagggctattcagctaagt

SEQ ID NO: 1135 - DNA, 25 bp, artificial
  Primer
agtaagatttgtacctgatgtctgt

SEQ ID NO: 1136 - DNA, 22 bp, artificial
  Primer
catggaagatgaggaagcagat

SEQ ID NO: 1137 - DNA, 17 bp, Artificial sequence
  Synthetic oligonucleotide
cctacttcacttcctaa

SEQ ID NO: 1138 - DNA, 19 bp, Artificial sequence
  Synthetic oligonucleotide
tttcctacttcacttccta

SEQ ID NO: 1139 - DNA, 18 bp, Artificial sequence
  Synthetic oligonucleotide
ttcctacttcacttccta

SEQ ID NO: 1140 - DNA, 18 bp, Artificial sequence
  Synthetic oligonucleotide
tttcctacttcacttcct

SEQ ID NO: 1141 - DNA, 17 bp, Artificial sequence
  Synthetic oligonucleotide
tttcctacttcacttcc

SEQ ID NO: 1142 - DNA, 17 bp, Artificial sequence
  Synthetic oligonucleotide
gtttcctacttcacttc

SEQ ID NO: 1143 - DNA, 18 bp, Artificial sequence
  Synthetic oligonucleotide
accaaacccaaacatccc

SEQ ID NO: 1144 - DNA, 20 bp, Artificial sequence
  Synthetic oligonucleotide
agaaaccaaacccaaacatc

SEQ ID NO: 1145 - DNA, 19 bp, Artificial sequence
  Synthetic oligonucleotide
agaaaccaaacccaaacat

SEQ ID NO: 1146 - DNA, 21 bp, Artificial sequence
  Synthetic oligonucleotide
ctcctaatacctaaaaacaaa

SEQ ID NO: 1147 - DNA, 19 bp, Artificial sequence
  Synthetic oligonucleotide
ctcctaatacctaaaaaca

SEQ ID NO: 1148 - DNA, 20 bp, Artificial sequence
  Synthetic oligonucleotide
actcctaatacctaaaaaca

SEQ ID NO: 1149 - DNA, 21 bp, Artificial sequence
  Synthetic oligonucleotide
cactcctaatacctaaaaaca

SEQ ID NO: 1150 - DNA, 20 bp, Artificial sequence
  Synthetic oligonucleotide
ccactcctaatacctaaaaa

SEQ ID NO: 1151 - DNA, 21 bp, Artificial sequence
  Synthetic oligonucleotide
tccactcctaatacctaaaaa

SEQ ID NO: 1152 - DNA, 19 bp, Artificial sequence
  Synthetic oligonucleotide
ccactcctaatacctaaaa

SEQ ID NO: 1153 - DNA, 20 bp, Artificial sequence
  Synthetic oligonucleotide
tccactcctaatacctaaaa

SEQ ID NO: 1154 - DNA, 18 bp, Artificial sequence
  Synthetic oligonucleotide
ccactcctaatacctaaa

SEQ ID NO: 1155 - DNA, 20 bp, Artificial sequence
  Synthetic oligonucleotide
gtccactcctaatacctaaa

SEQ ID NO: 1156 - DNA, 17 bp, Artificial sequence
  Synthetic oligonucleotide
ccactcctaatacctaa

SEQ ID NO: 1157 - DNA, 18 bp, Artificial sequence
  Synthetic oligonucleotide
tccactcctaatacctaa

SEQ ID NO: 1158 - DNA, 19 bp, Artificial sequence
  Synthetic oligonucleotide
gtccactcctaatacctaa

SEQ ID NO: 1159 - DNA, 19 bp, Artificial sequence
  Synthetic oligonucleotide
agtccactcctaataccta

SEQ ID NO: 1160 - DNA, 17 bp, Artificial sequence
  Synthetic oligonucleotide
tccactcctaataccta

SEQ ID NO: 1161 - DNA, 18 bp, Artificial sequence
  Synthetic oligonucleotide
agtccactcctaatacct

SEQ ID NO: 1162 - DNA, 16 bp, Artificial sequence
  Synthetic oligonucleotide
gtccactcctaatacc

SEQ ID NO: 1163 - DNA, 17 bp, Artificial sequence
  Synthetic oligonucleotide
agtccactcctaatacc

SEQ ID NO: 1164 - DNA, 18 bp, Artificial sequence
  Synthetic oligonucleotide
cagtccactcctaatacc

SEQ ID NO: 1165 - DNA, 18 bp, Artificial sequence
  Synthetic oligonucleotide
ccagtccactcctaatac

SEQ ID NO: 1166 - DNA, 17 bp, Artificial sequence
  Synthetic oligonucleotide
cagtccactcctaatac

SEQ ID NO: 1167 - DNA, 16 bp, Artificial sequence
  Synthetic oligonucleotide
agtccactcctaatac

SEQ ID NO: 1168 - DNA, 16 bp, Artificial sequence
  Synthetic oligonucleotide
cagtccactcctaata

SEQ ID NO: 1169 - DNA, 17 bp, Artificial sequence
  Synthetic oligonucleotide
ccagtccactcctaata

SEQ ID NO: 1170 - DNA, 17 bp, Artificial sequence
  Synthetic oligonucleotide
gcaactctttccaaaca

SEQ ID NO: 1171 - DNA, 18 bp, Artificial sequence
  Synthetic oligonucleotide
agcaactctttccaaaca

SEQ ID NO: 1172 - DNA, 19 bp, Artificial sequence
  Synthetic oligonucleotide
cagcaactctttccaaaca

SEQ ID NO: 1173 - DNA, 18 bp, Artificial sequence
  Synthetic oligonucleotide
ccagcaactctttccaaa

SEQ ID NO: 1174 - DNA, 17 bp, Artificial sequence
  Synthetic oligonucleotide
ccagcaactctttccaa

SEQ ID NO: 1175 - DNA, 18 bp, Artificial sequence
  Synthetic oligonucleotide
accagcaactctttccaa

SEQ ID NO: 1176 - DNA, 17 bp, Artificial sequence
  Synthetic oligonucleotide
ttaccagcaactctttc

SEQ ID NO: 1177 - DNA, 19 bp, Artificial sequence
  Synthetic oligonucleotide
tgctcctcctattaaataa

SEQ ID NO: 1178 - DNA, 18 bp, Artificial sequence
  Synthetic oligonucleotide
gctcctcctattaaataa

SEQ ID NO: 1179 - DNA, 17 bp, Artificial sequence
  Synthetic oligonucleotide
gctcctcctattaaata

SEQ ID NO: 1180 - DNA, 18 bp, Artificial sequence
  Synthetic oligonucleotide
tgctcctcctattaaata

SEQ ID NO: 1181 - DNA, 17 bp, Artificial sequence
  Synthetic oligonucleotide
tgctcctcctattaaat

SEQ ID NO: 1182 - DNA, 18 bp, Artificial sequence
  Synthetic oligonucleotide
ttgctcctcctattaaat

SEQ ID NO: 1183 - DNA, 21 bp, Artificial sequence
  Synthetic oligonucleotide
atttaataaaacaaaaaccct

SEQ ID NO: 1184 - DNA, 17 bp, Artificial sequence
  Synthetic oligonucleotide
gcccaaaaaactaaatt

SEQ ID NO: 1185 - DNA, 18 bp, Artificial sequence
  Synthetic oligonucleotide
gtttttacattctaactt

SEQ ID NO: 1186 - DNA, 18 bp, Artificial sequence
  Synthetic oligonucleotide
tgtttttacattctaact

SEQ ID NO: 1187 - DNA, 18 bp, Artificial sequence
  Synthetic oligonucleotide
ctgtttttacattctaac

SEQ ID NO: 1188 - DNA, 18 bp, Artificial sequence
  Synthetic oligonucleotide
ccccattcaaatatttat

SEQ ID NO: 1189 - DNA, 19 bp, Artificial sequence
  Synthetic oligonucleotide
gccccattcaaatatttat

SEQ ID NO: 1190 - DNA, 18 bp, Artificial sequence
  Synthetic oligonucleotide
gccccattcaaatattta

SEQ ID NO: 1191 - DNA, 21 bp, Artificial sequence
  Synthetic oligonucleotide
ccattcaaatatatacatttt

SEQ ID NO: 1192 - DNA, 21 bp, Artificial sequence
  Synthetic oligonucleotide
tccattcaaatatatacattt

SEQ ID NO: 1193 - DNA, 21 bp, Artificial sequence
  Synthetic oligonucleotide
atccattcaaatatatacatt

SEQ ID NO: 1194 - DNA, 20 bp, Artificial sequence
  Synthetic oligonucleotide
tccattcaaatatatacatt

SEQ ID NO: 1195 - DNA, 21 bp, Artificial sequence
  Synthetic oligonucleotide
tatccattcaaatatatacat

SEQ ID NO: 1196 - DNA, 19 bp, Artificial sequence
  Synthetic oligonucleotide
tccattcaaatatatacat

SEQ ID NO: 1197 - DNA, 19 bp, Artificial sequence
  Synthetic oligonucleotide
atccattcaaatatataca

SEQ ID NO: 1198 - DNA, 21 bp, Artificial sequence
  Synthetic oligonucleotide
ttatccattcaaatatataca

SEQ ID NO: 1199 - DNA, 18 bp, Artificial sequence
  Synthetic oligonucleotide
tccattcaaatatataca

SEQ ID NO: 1200 - DNA, 20 bp, Artificial sequence
  Synthetic oligonucleotide
tatccattcaaatatataca

SEQ ID NO: 1201 - DNA, 21 bp, Artificial sequence
  Synthetic oligonucleotide
ctttatccattcaaatatata

SEQ ID NO: 1202 - DNA, 21 bp, Artificial sequence
  Synthetic oligonucleotide
tctttatccattcaaatatat

SEQ ID NO: 1203 - DNA, 21 bp, Artificial sequence
  Synthetic oligonucleotide
ctctttatccattcaaatata

SEQ ID NO: 1204 - DNA, 20 bp, Artificial sequence
  Synthetic oligonucleotide
tctttatccattcaaatata

SEQ ID NO: 1205 - DNA, 19 bp, Artificial sequence
  Synthetic oligonucleotide
ctttatccattcaaatata

SEQ ID NO: 1206 - DNA, 21 bp, Artificial sequence
  Synthetic oligonucleotide
tctctttatccattcaaatat

SEQ ID NO: 1207 - DNA, 20 bp, Artificial sequence
  Synthetic oligonucleotide
ctctttatccattcaaatat

SEQ ID NO: 1208 - DNA, 19 bp, Artificial sequence
  Synthetic oligonucleotide
tctttatccattcaaatat

SEQ ID NO: 1209 - DNA, 20 bp, Artificial sequence
  Synthetic oligonucleotide
tctctttatccattcaaata

SEQ ID NO: 1210 - DNA, 19 bp, Artificial sequence
  Synthetic oligonucleotide
ctctttatccattcaaata

SEQ ID NO: 1211 - DNA, 19 bp, Artificial sequence
  Synthetic oligonucleotide
tctctttatccattcaaat

SEQ ID NO: 1212 - DNA, 18 bp, Artificial sequence
  Synthetic oligonucleotide
tctctttatccattcaaa

SEQ ID NO: 1213 - DNA, 18 bp, Artificial sequence
  Synthetic oligonucleotide
agcaccatatatatctca

SEQ ID NO: 1214 - DNA, 17 bp, Artificial sequence
  Synthetic oligonucleotide
gcaccatatatatctca

SEQ ID NO: 1215 - DNA, 19 bp, Artificial sequence
  Synthetic oligonucleotide
cagcaccatatatatctca

SEQ ID NO: 1216 - DNA, 17 bp, Artificial sequence
  Synthetic oligonucleotide
agcaccatatatatctc

SEQ ID NO: 1217 - DNA, 16 bp, Artificial sequence
  Synthetic oligonucleotide
gcaccatatatatctc

SEQ ID NO: 1218 - DNA, 18 bp, Artificial sequence
  Synthetic oligonucleotide
cagcaccatatatatctc

SEQ ID NO: 1219 - DNA, 17 bp, Artificial sequence
  Synthetic oligonucleotide
cagcaccatatatatct

SEQ ID NO: 1220 - DNA, 18 bp, Artificial sequence
  Synthetic oligonucleotide
acagcaccatatatatct

SEQ ID NO: 1221 - DNA, 17 bp, Artificial sequence
  Synthetic oligonucleotide
acagcaccatatatatc

SEQ ID NO: 1222 - DNA, 17 bp, Artificial sequence
  Synthetic oligonucleotide
ctatgttattatcccca

SEQ ID NO: 1223 - DNA, 17 bp, Artificial sequence
  Synthetic oligonucleotide
tctatgttattatcccc

SEQ ID NO: 1224 - DNA, 17 bp, Artificial sequence
  Synthetic oligonucleotide
ctctacactctaactct

SEQ ID NO: 1225 - DNA, 18 bp, Artificial sequence
  Synthetic oligonucleotide
tctctacactctaactct

SEQ ID NO: 1226 - DNA, 19 bp, Artificial sequence
  Synthetic oligonucleotide
ttctctacactctaactct

SEQ ID NO: 1227 - DNA, 20 bp, Artificial sequence
  Synthetic oligonucleotide
cttctctacactctaactct

SEQ ID NO: 1228 - DNA, 18 bp, Artificial sequence
  Synthetic oligonucleotide
ttctctacactctaactc

SEQ ID NO: 1229 - DNA, 19 bp, Artificial sequence
  Synthetic oligonucleotide
cttctctacactctaactc

SEQ ID NO: 1230 - DNA, 17 bp, Artificial sequence
  Synthetic oligonucleotide
tctctacactctaactc

SEQ ID NO: 1231 - DNA, 20 bp, Artificial sequence
  Synthetic oligonucleotide
ccttctctacactctaactc

SEQ ID NO: 1232 - DNA, 17 bp, Artificial sequence
  Synthetic oligonucleotide
ttctctacactctaact

SEQ ID NO: 1233 - DNA, 18 bp, Artificial sequence
  Synthetic oligonucleotide
cttctctacactctaact

SEQ ID NO: 1234 - DNA, 19 bp, Artificial sequence
  Synthetic oligonucleotide
ccttctctacactctaact

SEQ ID NO: 1235 - DNA, 18 bp, Artificial sequence
  Synthetic oligonucleotide
ccttctctacactctaac

SEQ ID NO: 1236 - DNA, 17 bp, Artificial sequence
  Synthetic oligonucleotide
cttctctacactctaac

SEQ ID NO: 1237 - DNA, 19 bp, Artificial sequence
  Synthetic oligonucleotide
agccttctctacactctaa

SEQ ID NO: 1238 - DNA, 17 bp, Artificial sequence
  Synthetic oligonucleotide
ccttctctacactctaa

SEQ ID NO: 1239 - DNA, 18 bp, Artificial sequence
  Synthetic oligonucleotide
gccttctctacactctaa

SEQ ID NO: 1240 - DNA, 18 bp, Artificial sequence
  Synthetic oligonucleotide
agccttctctacactcta

SEQ ID NO: 1241 - DNA, 21 bp, Artificial sequence
  Synthetic oligonucleotide
tactaactacaacacaaatca

SEQ ID NO: 1242 - DNA, 21 bp, Artificial sequence
  Synthetic oligonucleotide
ctactaactacaacacaaatc

SEQ ID NO: 1243 - DNA, 21 bp, Artificial sequence
  Synthetic oligonucleotide
cactactaactacaacacaaa

SEQ ID NO: 1244 - DNA, 20 bp, Artificial sequence
  Synthetic oligonucleotide
cactactaactacaacacaa

SEQ ID NO: 1245 - DNA, 21 bp, Artificial sequence
  Synthetic oligonucleotide
acactactaactacaacacaa

SEQ ID NO: 1246 - DNA, 19 bp, Artificial sequence
  Synthetic oligonucleotide
cactactaactacaacaca

SEQ ID NO: 1247 - DNA, 20 bp, Artificial sequence
  Synthetic oligonucleotide
acactactaactacaacaca

SEQ ID NO: 1248 - DNA, 20 bp, Artificial sequence
  Synthetic oligonucleotide
gacactactaactacaacac

SEQ ID NO: 1249 - DNA, 19 bp, Artificial sequence
  Synthetic oligonucleotide
gacactactaactacaaca

SEQ ID NO: 1250 - DNA, 18 bp, Artificial sequence
  Synthetic oligonucleotide
agacactactaactacaa

SEQ ID NO: 1251 - DNA, 17 bp, Artificial sequence
  Synthetic oligonucleotide
agacactactaactaca

SEQ ID NO: 1252 - DNA, 18 bp, Artificial sequence
  Synthetic oligonucleotide
atcatttacccccaacct

SEQ ID NO: 1253 - DNA, 17 bp, Artificial sequence
  Synthetic oligonucleotide
atcatttacccccaacc

SEQ ID NO: 1254 - DNA, 18 bp, Artificial sequence
  Synthetic oligonucleotide
caaatcatttacccccaa

SEQ ID NO: 1255 - DNA, 19 bp, Artificial sequence
  Synthetic oligonucleotide
ccaaatcatttacccccaa

SEQ ID NO: 1256 - DNA, 19 bp, Artificial sequence
  Synthetic oligonucleotide
accaaatcatttaccccca

SEQ ID NO: 1257 - DNA, 19 bp, Artificial sequence
  Synthetic oligonucleotide
taccaaatcatttaccccc

SEQ ID NO: 1258 - DNA, 17 bp, Artificial sequence
  Synthetic oligonucleotide
accaaatcatttacccc

SEQ ID NO: 1259 - DNA, 18 bp, Artificial sequence
  Synthetic oligonucleotide
taccaaatcatttacccc

SEQ ID NO: 1260 - DNA, 19 bp, Artificial sequence
  Synthetic oligonucleotide
ctaccaaatcatttacccc

SEQ ID NO: 1261 - DNA, 17 bp, Artificial sequence
  Synthetic oligonucleotide
taccaaatcatttaccc

SEQ ID NO: 1262 - DNA, 17 bp, Artificial sequence
  Synthetic oligonucleotide
ctaccaaatcatttacc

SEQ ID NO: 1263 - DNA, 19 bp, Artificial sequence
  Synthetic oligonucleotide
tgctaccaaatcatttacc

SEQ ID NO: 1264 - DNA, 18 bp, Artificial sequence
  Synthetic oligonucleotide
gctaccaaatcatttacc

SEQ ID NO: 1265 - DNA, 18 bp, Artificial sequence
  Synthetic oligonucleotide
tgctaccaaatcatttac

SEQ ID NO: 1266 - DNA, 17 bp, Artificial sequence
  Synthetic oligonucleotide
gctaccaaatcatttac

SEQ ID NO: 1267 - DNA, 17 bp, Artificial sequence
  Synthetic oligonucleotide
tgctaccaaatcattta

SEQ ID NO: 1268 - DNA, 18 bp, Artificial sequence
  Synthetic oligonucleotide
ctgctaccaaatcattta

SEQ ID NO: 1269 - DNA, 18 bp, Artificial sequence
  Synthetic oligonucleotide
actgctaccaaatcattt

SEQ ID NO: 1270 - DNA, 17 bp, Artificial sequence
  Synthetic oligonucleotide
ctgctaccaaatcattt

SEQ ID NO: 1271 - DNA, 17 bp, Artificial sequence
  Synthetic oligonucleotide
actgctaccaaatcatt

SEQ ID NO: 1272 - DNA, 17 bp, Artificial sequence
  Synthetic oligonucleotide
cactttgccataatcaa

SEQ ID NO: 1273 - DNA, 19 bp, Artificial sequence
  Synthetic oligonucleotide
ttatctcaaactatcccca

SEQ ID NO: 1274 - DNA, 17 bp, Artificial sequence
  Synthetic oligonucleotide
atctcaaactatcccca

SEQ ID NO: 1275 - DNA, 20 bp, Artificial sequence
  Synthetic oligonucleotide
cttatctcaaactatcccca

SEQ ID NO: 1276 - DNA, 17 bp, Artificial sequence
  Synthetic oligonucleotide
tatctcaaactatcccc

SEQ ID NO: 1277 - DNA, 19 bp, Artificial sequence
  Synthetic oligonucleotide
cttatctcaaactatcccc

SEQ ID NO: 1278 - DNA, 18 bp, Artificial sequence
  Synthetic oligonucleotide
ttatctcaaactatcccc

SEQ ID NO: 1279 - DNA, 18 bp, Artificial sequence
  Synthetic oligonucleotide
cttatctcaaactatccc

SEQ ID NO: 1280 - DNA, 19 bp, Artificial sequence
  Synthetic oligonucleotide
ccttatctcaaactatccc

SEQ ID NO: 1281 - DNA, 17 bp, Artificial sequence
  Synthetic oligonucleotide
ttatctcaaactatccc

SEQ ID NO: 1282 - DNA, 17 bp, Artificial sequence
  Synthetic oligonucleotide
cttatctcaaactatcc

SEQ ID NO: 1283 - DNA, 19 bp, Artificial sequence
  Synthetic oligonucleotide
cccttatctcaaactatcc

SEQ ID NO: 1284 - DNA, 18 bp, Artificial sequence
  Synthetic oligonucleotide
ccttatctcaaactatcc

SEQ ID NO: 1285 - DNA, 17 bp, Artificial sequence
  Synthetic oligonucleotide
ccttatctcaaactatc

SEQ ID NO: 1286 - DNA, 19 bp, Artificial sequence
  Synthetic oligonucleotide
gcccttatctcaaactatc

SEQ ID NO: 1287 - DNA, 18 bp, Artificial sequence
  Synthetic oligonucleotide
cccttatctcaaactatc

SEQ ID NO: 1288 - DNA, 19 bp, Artificial sequence
  Synthetic oligonucleotide
tgcccttatctcaaactat

SEQ ID NO: 1289 - DNA, 18 bp, Artificial sequence
  Synthetic oligonucleotide
gcccttatctcaaactat

SEQ ID NO: 1290 - DNA, 17 bp, Artificial sequence
  Synthetic oligonucleotide
cccttatctcaaactat

SEQ ID NO: 1291 - DNA, 17 bp, Artificial sequence
  Synthetic oligonucleotide
gcccttatctcaaacta

SEQ ID NO: 1292 - DNA, 18 bp, Artificial sequence
  Synthetic oligonucleotide
tgcccttatctcaaacta

SEQ ID NO: 1293 - DNA, 17 bp, Artificial sequence
  Synthetic oligonucleotide
tgcccttatctcaaact

SEQ ID NO: 1294 - DNA, 17 bp, Artificial sequence
  Synthetic oligonucleotide
ttgcccttatctcaaac

SEQ ID NO: 1295 - DNA, 16 bp, Artificial sequence
  Synthetic oligonucleotide
cttgcccttatctcaa

SEQ ID NO: 1296 - DNA, 18 bp, Artificial sequence
  Synthetic oligonucleotide
tgaaatcaaacttcatca

SEQ ID NO: 1297 - DNA, 16 bp, Artificial sequence
  Synthetic oligonucleotide
ggtcaccatacttaat

SEQ ID NO: 1298 - DNA, 18 bp, Artificial sequence
  Synthetic oligonucleotide
tgctaacacaaatttcct

SEQ ID NO: 1299 - DNA, 17 bp, Artificial sequence
  Synthetic oligonucleotide
gctaacacaaatttcct

SEQ ID NO: 1300 - DNA, 18 bp, Artificial sequence
  Synthetic oligonucleotide
ttgctaacacaaatttcc

SEQ ID NO: 1301 - DNA, 17 bp, Artificial sequence
  Synthetic oligonucleotide
tgctaacacaaatttcc

SEQ ID NO: 1302 - DNA, 17 bp, Artificial sequence
  Synthetic oligonucleotide
ttgctaacacaaatttc

SEQ ID NO: 1303 - DNA, 17 bp, Artificial sequence
  Synthetic oligonucleotide
cctttgctaacacaaat

SEQ ID NO: 1304 - DNA, 19 bp, Artificial sequence
  Synthetic oligonucleotide
gtataaccaataataacta

SEQ ID NO: 1305 - DNA, 18 bp, Artificial sequence
  Synthetic oligonucleotide
tctgacatcacacaattt

SEQ ID NO: 1306 - DNA, 17 bp, Artificial sequence
  Synthetic oligonucleotide
tctgacatcacacaatt

SEQ ID NO: 1307 - DNA, 17 bp, Artificial sequence
  Synthetic oligonucleotide
tatctgacatcacacaa

SEQ ID NO: 1308 - DNA, 17 bp, Artificial sequence
  Synthetic oligonucleotide
ctattccttaacccaac

SEQ ID NO: 1309 - DNA, 19 bp, Artificial sequence
  Synthetic oligonucleotide
gtctattccttaacccaac

SEQ ID NO: 1310 - DNA, 18 bp, Artificial sequence
  Synthetic oligonucleotide
gtctattccttaacccaa

SEQ ID NO: 1311 - DNA, 17 bp, Artificial sequence
  Synthetic oligonucleotide
tctattccttaacccaa

SEQ ID NO: 1312 - DNA, 17 bp, Artificial sequence
  Synthetic oligonucleotide
gtctattccttaaccca

SEQ ID NO: 1313 - DNA, 16 bp, Artificial sequence
  Synthetic oligonucleotide
gtctattccttaaccc

SEQ ID NO: 1314 - DNA, 16 bp, Artificial sequence
  Synthetic oligonucleotide
ggtctattccttaacc

SEQ ID NO: 1315 - DNA, 18 bp, Artificial sequence
  Synthetic oligonucleotide
agaacatttccttctcct

SEQ ID NO: 1316 - DNA, 17 bp, Artificial sequence
  Synthetic oligonucleotide
aactgtcccaaacaacc

SEQ ID NO: 1317 - DNA, 18 bp, Artificial sequence
  Synthetic oligonucleotide
ttagtctccctcattttc

SEQ ID NO: 1318 - DNA, 17 bp, Artificial sequence
  Synthetic oligonucleotide
atttagtctccctcatt

SEQ ID NO: 1319 - DNA, 17 bp, Artificial sequence
  Synthetic oligonucleotide
atgcatcaaatctcata

SEQ ID NO: 1320 - DNA, 21 bp, Artificial sequence
  Synthetic oligonucleotide
cctaaataatttaatcattaa

SEQ ID NO: 1321 - DNA, 21 bp, Artificial sequence
  Synthetic oligonucleotide
ccctaaataatttaatcatta

SEQ ID NO: 1322 - DNA, 21 bp, Artificial sequence
  Synthetic oligonucleotide
cccctaaataatttaatcatt

SEQ ID NO: 1323 - DNA, 20 bp, Artificial sequence
  Synthetic oligonucleotide
ccctaaataatttaatcatt

SEQ ID NO: 1324 - DNA, 19 bp, Artificial sequence
  Synthetic oligonucleotide
ccctaaataatttaatcat

SEQ ID NO: 1325 - DNA, 19 bp, Artificial sequence
  Synthetic oligonucleotide
cccctaaataatttaatca

SEQ ID NO: 1326 - DNA, 18 bp, Artificial sequence
  Synthetic oligonucleotide
ccctaaataatttaatca

SEQ ID NO: 1327 - DNA, 18 bp, Artificial sequence
  Synthetic oligonucleotide
cccctaaataatttaatc

SEQ ID NO: 1328 - DNA, 19 bp, Artificial sequence
  Synthetic oligonucleotide
tcccctaaataatttaatc

SEQ ID NO: 1329 - DNA, 18 bp, Artificial sequence
  Synthetic oligonucleotide
ttgctaatatttccaaaa

SEQ ID NO: 1330 - DNA, 17 bp, Artificial sequence
  Synthetic oligonucleotide
cttgctaatatttccaa

SEQ ID NO: 1331 - DNA, 18 bp, Artificial sequence
  Synthetic oligonucleotide
actgtcatccatatttcc

SEQ ID NO: 1332 - DNA, 17 bp, Artificial sequence
  Synthetic oligonucleotide
actgtcatccatatttc

SEQ ID NO: 1333 - DNA, 18 bp, Artificial sequence
  Synthetic oligonucleotide
aatgccccactctaatat

SEQ ID NO: 1334 - DNA, 16 bp, Artificial sequence
  Synthetic oligonucleotide
tgccccactctaatat

SEQ ID NO: 1335 - DNA, 17 bp, Artificial sequence
  Synthetic oligonucleotide
atgccccactctaatat

SEQ ID NO: 1336 - DNA, 18 bp, Artificial sequence
  Synthetic oligonucleotide
aaatgccccactctaata

SEQ ID NO: 1337 - DNA, 16 bp, Artificial sequence
  Synthetic oligonucleotide
atgccccactctaata

SEQ ID NO: 1338 - DNA, 17 bp, Artificial sequence
  Synthetic oligonucleotide
aatgccccactctaata

SEQ ID NO: 1339 - DNA, 17 bp, Artificial sequence
  Synthetic oligonucleotide
ttaaatgccccactcta

SEQ ID NO: 1340 - DNA, 18 bp, Artificial sequence
  Synthetic oligonucleotide
tctgaaaattcactatct

SEQ ID NO: 1341 - DNA, 17 bp, Artificial sequence
  Synthetic oligonucleotide
gtctactatatacatct

SEQ ID NO: 1342 - DNA, 18 bp, Artificial sequence
  Synthetic oligonucleotide
agtctactatatacatct

SEQ ID NO: 1343 - DNA, 17 bp, Artificial sequence
  Synthetic oligonucleotide
agtctactatatacatc

SEQ ID NO: 1344 - DNA, 16 bp, Artificial sequence
  Synthetic oligonucleotide
gtctactatatacatc

SEQ ID NO: 1345 - DNA, 18 bp, Artificial sequence
  Synthetic oligonucleotide
tagtctactatatacatc

SEQ ID NO: 1346 - DNA, 17 bp, Artificial sequence
  Synthetic oligonucleotide
tagtctactatatacat

SEQ ID NO: 1347 - DNA, 18 bp, Artificial sequence
  Synthetic oligonucleotide
ctagtctactatatacat

SEQ ID NO: 1348 - DNA, 17 bp, Artificial sequence
  Synthetic oligonucleotide
ctagtctactatataca

SEQ ID NO: 1349 - DNA, 17 bp, Artificial sequence
  Synthetic oligonucleotide
actagtctactatatac

SEQ ID NO: 1350 - DNA, 16 bp, Artificial sequence
  Synthetic oligonucleotide
ctagtctactatatac

SEQ ID NO: 1351 - DNA, 17 bp, Artificial sequence
  Synthetic oligonucleotide
gtatattctacccataa

SEQ ID NO: 1352 - DNA, 18 bp, Artificial sequence
  Synthetic oligonucleotide
tgtatattctacccataa

SEQ ID NO: 1353 - DNA, 17 bp, Artificial sequence
  Synthetic oligonucleotide
tgtatattctacccata

SEQ ID NO: 1354 - DNA, 18 bp, Artificial sequence
  Synthetic oligonucleotide
atgtatattctacccata

SEQ ID NO: 1355 - DNA, 17 bp, Artificial sequence
  Synthetic oligonucleotide
atgtatattctacccat

SEQ ID NO: 1356 - DNA, 19 bp, Artificial sequence
  Synthetic oligonucleotide
gaaaaccacacaattccta

SEQ ID NO: 1357 - DNA, 18 bp, Artificial sequence
  Synthetic oligonucleotide
gaaaaccacacaattcct

SEQ ID NO: 1358 - DNA, 19 bp, Artificial sequence
  Synthetic oligonucleotide
agaaaaccacacaattcct

SEQ ID NO: 1359 - DNA, 19 bp, Artificial sequence
  Synthetic oligonucleotide
cagaaaaccacacaattcc

SEQ ID NO: 1360 - DNA, 18 bp, Artificial sequence
  Synthetic oligonucleotide
agaaaaccacacaattcc

SEQ ID NO: 1361 - DNA, 19 bp, Artificial sequence
  Synthetic oligonucleotide
ccagaaaaccacacaattc

SEQ ID NO: 1362 - DNA, 18 bp, Artificial sequence
  Synthetic oligonucleotide
ccagaaaaccacacaatt

SEQ ID NO: 1363 - DNA, 18 bp, Artificial sequence
  Synthetic oligonucleotide
tccagaaaaccacacaat

SEQ ID NO: 1364 - DNA, 18 bp, Artificial sequence
  Synthetic oligonucleotide
ttccagaaaaccacacaa

SEQ ID NO: 1365 - DNA, 19 bp, Artificial sequence
  Synthetic oligonucleotide
gatatatcactaaatccat

SEQ ID NO: 1366 - DNA, 18 bp, Artificial sequence
  Synthetic oligonucleotide
gatatatcactaaatcca

SEQ ID NO: 1367 - DNA, 19 bp, Artificial sequence
  Synthetic oligonucleotide
agatatatcactaaatcca

SEQ ID NO: 1368 - DNA, 18 bp, Artificial sequence
  Synthetic oligonucleotide
agatatatcactaaatcc

SEQ ID NO: 1369 - DNA, 19 bp, Artificial sequence
  Synthetic oligonucleotide
tcatatataaatttctcta

SEQ ID NO: 1370 - DNA, 18 bp, Artificial sequence
  Synthetic oligonucleotide
tcatatataaatttctct

SEQ ID NO: 1371 - DNA, 17 bp, Artificial sequence
  Synthetic oligonucleotide
aagatcacacaaccata

SEQ ID NO: 1372 - DNA, 18 bp, Artificial sequence
  Synthetic oligonucleotide
taaaagatcacacaacca

SEQ ID NO: 1373 - DNA, 20 bp, Artificial sequence
  Synthetic oligonucleotide
catcacataaaaacccactt

SEQ ID NO: 1374 - DNA, 19 bp, Artificial sequence
  Synthetic oligonucleotide
catcacataaaaacccact

SEQ ID NO: 1375 - DNA, 20 bp, Artificial sequence
  Synthetic oligonucleotide
tcatcacataaaaacccact

SEQ ID NO: 1376 - DNA, 18 bp, Artificial sequence
  Synthetic oligonucleotide
catcacataaaaacccac

SEQ ID NO: 1377 - DNA, 19 bp, Artificial sequence
  Synthetic oligonucleotide
tcatcacataaaaacccac

SEQ ID NO: 1378 - DNA, 20 bp, Artificial sequence
  Synthetic oligonucleotide
gtcatcacataaaaacccac

SEQ ID NO: 1379 - DNA, 19 bp, Artificial sequence
  Synthetic oligonucleotide
gtcatcacataaaaaccca

SEQ ID NO: 1380 - DNA, 18 bp, Artificial sequence
  Synthetic oligonucleotide
tcatcacataaaaaccca

SEQ ID NO: 1381 - DNA, 17 bp, Artificial sequence
  Synthetic oligonucleotide
catcacataaaaaccca

SEQ ID NO: 1382 - DNA, 17 bp, Artificial sequence
  Synthetic oligonucleotide
tcatcacataaaaaccc

SEQ ID NO: 1383 - DNA, 18 bp, Artificial sequence
  Synthetic oligonucleotide
gtcatcacataaaaaccc

SEQ ID NO: 1384 - DNA, 19 bp, Artificial sequence
  Synthetic oligonucleotide
agtcatcacataaaaaccc

SEQ ID NO: 1385 - DNA, 19 bp, Artificial sequence
  Synthetic oligonucleotide
tagtcatcacataaaaacc

SEQ ID NO: 1386 - DNA, 18 bp, Artificial sequence
  Synthetic oligonucleotide
agtcatcacataaaaacc

SEQ ID NO: 1387 - DNA, 17 bp, Artificial sequence
  Synthetic oligonucleotide
atgctaaatacaaatct

SEQ ID NO: 1388 - DNA, 20 bp, Artificial sequence
  Synthetic oligonucleotide
gaaaccattactacaaccaa

SEQ ID NO: 1389 - DNA, 19 bp, Artificial sequence
  Synthetic oligonucleotide
gaaaccattactacaacca

SEQ ID NO: 1390 - DNA, 19 bp, Artificial sequence
  Synthetic oligonucleotide
atgaaaccattactacaac

SEQ ID NO: 1391 - DNA, 18 bp, Artificial sequence
  Synthetic oligonucleotide
catgaaaccattactaca

SEQ ID NO: 1392 - DNA, 18 bp, Artificial sequence
  Synthetic oligonucleotide
ccatgaaaccattactac

SEQ ID NO: 1393 - DNA, 17 bp, Artificial sequence
  Synthetic oligonucleotide
ctcccatgaaaccatta

SEQ ID NO: 1394 - DNA, 18 bp, Artificial sequence
  Synthetic oligonucleotide
tgcttactttatacaaaa

SEQ ID NO: 1395 - DNA, 18 bp, Artificial sequence
  Synthetic oligonucleotide
atgttaatactttttcca

SEQ ID NO: 1396 - DNA, 17 bp, Artificial sequence
  Synthetic oligonucleotide
cctaatttaacccacaa

SEQ ID NO: 1397 - DNA, 19 bp, Artificial sequence
  Synthetic oligonucleotide
atcctaatttaacccacaa

SEQ ID NO: 1398 - DNA, 18 bp, Artificial sequence
  Synthetic oligonucleotide
tcctaatttaacccacaa

SEQ ID NO: 1399 - DNA, 21 bp, Artificial sequence
  Synthetic oligonucleotide
taatcctaatttaacccacaa

SEQ ID NO: 1400 - DNA, 20 bp, Artificial sequence
  Synthetic oligonucleotide
taatcctaatttaacccaca

SEQ ID NO: 1401 - DNA, 19 bp, Artificial sequence
  Synthetic oligonucleotide
aatcctaatttaacccaca

SEQ ID NO: 1402 - DNA, 17 bp, Artificial sequence
  Synthetic oligonucleotide
tcctaatttaacccaca

SEQ ID NO: 1403 - DNA, 19 bp, Artificial sequence
  Synthetic oligonucleotide
taatcctaatttaacccac

SEQ ID NO: 1404 - DNA, 17 bp, Artificial sequence
  Synthetic oligonucleotide
atcctaatttaacccac

SEQ ID NO: 1405 - DNA, 18 bp, Artificial sequence
  Synthetic oligonucleotide
aatcctaatttaacccac

SEQ ID NO: 1406 - DNA, 18 bp, Artificial sequence
  Synthetic oligonucleotide
taatcctaatttaaccca

SEQ ID NO: 1407 - DNA, 17 bp, Artificial sequence
  Synthetic oligonucleotide
aatcctaatttaaccca

SEQ ID NO: 1408 - DNA, 19 bp, Artificial sequence
  Synthetic oligonucleotide
gtaatcctaatttaaccca

SEQ ID NO: 1409 - DNA, 17 bp, Artificial sequence
  Synthetic oligonucleotide
taatcctaatttaaccc

SEQ ID NO: 1410 - DNA, 18 bp, Artificial sequence
  Synthetic oligonucleotide
gtaatcctaatttaaccc

SEQ ID NO: 1411 - DNA, 19 bp, Artificial sequence
  Synthetic oligonucleotide
agtaatcctaatttaaccc

SEQ ID NO: 1412 - DNA, 18 bp, Artificial sequence
  Synthetic oligonucleotide
agtaatcctaatttaacc

SEQ ID NO: 1413 - DNA, 18 bp, Artificial sequence
  Synthetic oligonucleotide
tcatttatcactaccaca

SEQ ID NO: 1414 - DNA, 20 bp, Artificial sequence
  Synthetic oligonucleotide
catcatttatcactaccaca

SEQ ID NO: 1415 - DNA, 17 bp, Artificial sequence
  Synthetic oligonucleotide
catttatcactaccaca

SEQ ID NO: 1416 - DNA, 19 bp, Artificial sequence
  Synthetic oligonucleotide
atcatttatcactaccaca

SEQ ID NO: 1417 - DNA, 21 bp, Artificial sequence
  Synthetic oligonucleotide
acatcatttatcactaccaca

SEQ ID NO: 1418 - DNA, 17 bp, Artificial sequence
  Synthetic oligonucleotide
tcatttatcactaccac

SEQ ID NO: 1419 - DNA, 18 bp, Artificial sequence
  Synthetic oligonucleotide
atcatttatcactaccac

SEQ ID NO: 1420 - DNA, 19 bp, Artificial sequence
  Synthetic oligonucleotide
catcatttatcactaccac

SEQ ID NO: 1421 - DNA, 21 bp, Artificial sequence
  Synthetic oligonucleotide
aacatcatttatcactaccac

SEQ ID NO: 1422 - DNA, 20 bp, Artificial sequence
  Synthetic oligonucleotide
aacatcatttatcactacca

SEQ ID NO: 1423 - DNA, 18 bp, Artificial sequence
  Synthetic oligonucleotide
catcatttatcactacca

SEQ ID NO: 1424 - DNA, 21 bp, Artificial sequence
  Synthetic oligonucleotide
taacatcatttatcactacca

SEQ ID NO: 1425 - DNA, 19 bp, Artificial sequence
  Synthetic oligonucleotide
acatcatttatcactacca

SEQ ID NO: 1426 - DNA, 20 bp, Artificial sequence
  Synthetic oligonucleotide
taacatcatttatcactacc

SEQ ID NO: 1427 - DNA, 18 bp, Artificial sequence
  Synthetic oligonucleotide
acatcatttatcactacc

SEQ ID NO: 1428 - DNA, 21 bp, Artificial sequence
  Synthetic oligonucleotide
ttaacatcatttatcactacc

SEQ ID NO: 1429 - DNA, 19 bp, Artificial sequence
  Synthetic oligonucleotide
aacatcatttatcactacc

SEQ ID NO: 1430 - DNA, 20 bp, Artificial sequence
  Synthetic oligonucleotide
ttaacatcatttatcactac

SEQ ID NO: 1431 - DNA, 19 bp, Artificial sequence
  Synthetic oligonucleotide
taacatcatttatcactac

SEQ ID NO: 1432 - DNA, 21 bp, Artificial sequence
  Synthetic oligonucleotide
attaacatcatttatcactac

SEQ ID NO: 1433 - DNA, 20 bp, Artificial sequence
  Synthetic oligonucleotide
attaacatcatttatcacta

SEQ ID NO: 1434 - DNA, 19 bp, Artificial sequence
  Synthetic oligonucleotide
ttaacatcatttatcacta

SEQ ID NO: 1435 - DNA, 21 bp, Artificial sequence
  Synthetic oligonucleotide
taattaacatcatttatcact

SEQ ID NO: 1436 - DNA, 21 bp, Artificial sequence
  Synthetic oligonucleotide
ctaattaacatcatttatcac

SEQ ID NO: 1437 - DNA, 21 bp, Artificial sequence
  Synthetic oligonucleotide
cctaattaacatcatttatca

SEQ ID NO: 1438 - DNA, 20 bp, Artificial sequence
  Synthetic oligonucleotide
ctaattaacatcatttatca

SEQ ID NO: 1439 - DNA, 20 bp, Artificial sequence
  Synthetic oligonucleotide
cctaattaacatcatttatc

SEQ ID NO: 1440 - DNA, 21 bp, Artificial sequence
  Synthetic oligonucleotide
ccctaattaacatcatttatc

SEQ ID NO: 1441 - DNA, 19 bp, Artificial sequence
  Synthetic oligonucleotide
cctaattaacatcatttat

SEQ ID NO: 1442 - DNA, 18 bp, Artificial sequence
  Synthetic oligonucleotide
cctaattaacatcattta

SEQ ID NO: 1443 - DNA, 19 bp, Artificial sequence
  Synthetic oligonucleotide
ccctaattaacatcattta

SEQ ID NO: 1444 - DNA, 19 bp, Artificial sequence
  Synthetic oligonucleotide
gccctaattaacatcattt

SEQ ID NO: 1445 - DNA, 18 bp, Artificial sequence
  Synthetic oligonucleotide
ccctaattaacatcattt

SEQ ID NO: 1446 - DNA, 16 bp, Artificial sequence
  Synthetic oligonucleotide
cggccctaattaacat

SEQ ID NO: 1447 - DNA, 15 bp, Artificial sequence
  Synthetic oligonucleotide
ctcggccctaattaa

SEQ ID NO: 1448 - DNA, 21 bp, Artificial sequence
  Synthetic oligonucleotide
cacatataacatataaacaca

SEQ ID NO: 1449 - DNA, 21 bp, Artificial sequence
  Synthetic oligonucleotide
tcacatataacatataaacac

SEQ ID NO: 1450 - DNA, 20 bp, Artificial sequence
  Synthetic oligonucleotide
actatcacatataacatata

SEQ ID NO: 1451 - DNA, 21 bp, Artificial sequence
  Synthetic oligonucleotide
cactatcacatataacatata

SEQ ID NO: 1452 - DNA, 20 bp, Artificial sequence
  Synthetic oligonucleotide
cactatcacatataacatat

SEQ ID NO: 1453 - DNA, 19 bp, Artificial sequence
  Synthetic oligonucleotide
cactatcacatataacata

SEQ ID NO: 1454 - DNA, 18 bp, Artificial sequence
  Synthetic oligonucleotide
cactatcacatataacat

SEQ ID NO: 1455 - DNA, 17 bp, Artificial sequence
  Synthetic oligonucleotide
cactatcacatataaca

SEQ ID NO: 1456 - DNA, 17 bp, Artificial sequence
  Synthetic oligonucleotide
caaagttttcccattac

SEQ ID NO: 1457 - DNA, 17 bp, Artificial sequence
  Synthetic oligonucleotide
acaaagttttcccatta

SEQ ID NO: 1458 - DNA, 17 bp, Artificial sequence
  Synthetic oligonucleotide
tcagtccaacataactc

SEQ ID NO: 1459 - DNA, 16 bp, Artificial sequence
  Synthetic oligonucleotide
cagtccaacataactc

SEQ ID NO: 1460 - DNA, 18 bp, Artificial sequence
  Synthetic oligonucleotide
atcagtccaacataactc

SEQ ID NO: 1461 - DNA, 17 bp, Artificial sequence
  Synthetic oligonucleotide
atcagtccaacataact

SEQ ID NO: 1462 - DNA, 21 bp, Artificial sequence
  Synthetic oligonucleotide
taaacattaaaccctcccaaa

SEQ ID NO: 1463 - DNA, 18 bp, Artificial sequence
  Synthetic oligonucleotide
aacattaaaccctcccaa

SEQ ID NO: 1464 - DNA, 20 bp, Artificial sequence
  Synthetic oligonucleotide
taaacattaaaccctcccaa

SEQ ID NO: 1465 - DNA, 19 bp, Artificial sequence
  Synthetic oligonucleotide
aaacattaaaccctcccaa

SEQ ID NO: 1466 - DNA, 21 bp, Artificial sequence
  Synthetic oligonucleotide
tataaacattaaaccctccca

SEQ ID NO: 1467 - DNA, 16 bp, Artificial sequence
  Synthetic oligonucleotide
aacattaaaccctccc

SEQ ID NO: 1468 - DNA, 17 bp, Artificial sequence
  Synthetic oligonucleotide
aaacattaaaccctccc

SEQ ID NO: 1469 - DNA, 18 bp, Artificial sequence
  Synthetic oligonucleotide
taaacattaaaccctccc

SEQ ID NO: 1470 - DNA, 19 bp, Artificial sequence
  Synthetic oligonucleotide
ataaacattaaaccctccc

SEQ ID NO: 1471 - DNA, 19 bp, Artificial sequence
  Synthetic oligonucleotide
tataaacattaaaccctcc

SEQ ID NO: 1472 - DNA, 17 bp, Artificial sequence
  Synthetic oligonucleotide
taaacattaaaccctcc

SEQ ID NO: 1473 - DNA, 21 bp, Artificial sequence
  Synthetic oligonucleotide
actataaacattaaaccctcc

SEQ ID NO: 1474 - DNA, 18 bp, Artificial sequence
  Synthetic oligonucleotide
ataaacattaaaccctcc

SEQ ID NO: 1475 - DNA, 21 bp, Artificial sequence
  Synthetic oligonucleotide
aactataaacattaaaccctc

SEQ ID NO: 1476 - DNA, 19 bp, Artificial sequence
  Synthetic oligonucleotide
ctataaacattaaaccctc

SEQ ID NO: 1477 - DNA, 20 bp, Artificial sequence
  Synthetic oligonucleotide
actataaacattaaaccctc

SEQ ID NO: 1478 - DNA, 21 bp, Artificial sequence
  Synthetic oligonucleotide
aaactataaacattaaaccct

SEQ ID NO: 1479 - DNA, 18 bp, Artificial sequence
  Synthetic oligonucleotide
ctataaacattaaaccct

SEQ ID NO: 1480 - DNA, 19 bp, Artificial sequence
  Synthetic oligonucleotide
actataaacattaaaccct

SEQ ID NO: 1481 - DNA, 20 bp, Artificial sequence
  Synthetic oligonucleotide
aactataaacattaaaccct

SEQ ID NO: 1482 - DNA, 19 bp, Artificial sequence
  Synthetic oligonucleotide
gctttaaactataaacatt

SEQ ID NO: 1483 - DNA, 18 bp, Artificial sequence
  Synthetic oligonucleotide
tgctttaaactataaaca

SEQ ID NO: 1484 - DNA, 17 bp, Artificial sequence
  Synthetic oligonucleotide
cagatttatcactatta

SEQ ID NO: 1485 - DNA, 17 bp, Artificial sequence
  Synthetic oligonucleotide
tcacagcctatcaccac

SEQ ID NO: 1486 - DNA, 17 bp, Artificial sequence
  Synthetic oligonucleotide
atcacagcctatcacca

SEQ ID NO: 1487 - DNA, 17 bp, Artificial sequence
  Synthetic oligonucleotide
aatcacagcctatcacc

SEQ ID NO: 1488 - DNA, 16 bp, Artificial sequence
  Synthetic oligonucleotide
atcacagcctatcacc

SEQ ID NO: 1489 - DNA, 16 bp, Artificial sequence
  Synthetic oligonucleotide
gcgtcacccaaatcac

SEQ ID NO: 1490 - DNA, 16 bp, Artificial sequence
  Synthetic oligonucleotide
agcgtcacccaaatca

SEQ ID NO: 1491 - DNA, 15 bp, Artificial sequence
  Synthetic oligonucleotide
agcgtcacccaaatc

SEQ ID NO: 1492 - DNA, 17 bp, Artificial sequence
  Synthetic oligonucleotide
cagatcctaaaatcact

SEQ ID NO: 1493 - DNA, 17 bp, Artificial sequence
  Synthetic oligonucleotide
tcagatcctaaaatcac

SEQ ID NO: 1494 - DNA, 18 bp, Artificial sequence
  Synthetic oligonucleotide
agtaaaaccaatcatcat

SEQ ID NO: 1495 - DNA, 17 bp, Artificial sequence
  Synthetic oligonucleotide
agtaaaaccaatcatca

SEQ ID NO: 1496 - DNA, 20 bp, Artificial sequence
  Synthetic oligonucleotide
cccttccatctctactaaaa

SEQ ID NO: 1497 - DNA, 20 bp, Artificial sequence
  Synthetic oligonucleotide
ataactacataacaaaccca

SEQ ID NO: 1498 - DNA, 21 bp, Artificial sequence
  Synthetic oligonucleotide
aataactacataacaaaccca

SEQ ID NO: 1499 - DNA, 18 bp, Artificial sequence
  Synthetic oligonucleotide
aactacataacaaaccca

SEQ ID NO: 1500 - DNA, 19 bp, Artificial sequence
  Synthetic oligonucleotide
taactacataacaaaccca

SEQ ID NO: 1501 - DNA, 17 bp, Artificial sequence
  Synthetic oligonucleotide
actacataacaaaccca

SEQ ID NO: 1502 - DNA, 21 bp, Artificial sequence
  Synthetic oligonucleotide
caataactacataacaaaccc

SEQ ID NO: 1503 - DNA, 19 bp, Artificial sequence
  Synthetic oligonucleotide
ataactacataacaaaccc

SEQ ID NO: 1504 - DNA, 21 bp, Artificial sequence
  Synthetic oligonucleotide
acaataactacataacaaacc

SEQ ID NO: 1505 - DNA, 19 bp, Artificial sequence
  Synthetic oligonucleotide
tgaattcacaataactaca

SEQ ID NO: 1506 - DNA, 18 bp, Artificial sequence
  Synthetic oligonucleotide
gcacatttttcttaaact

SEQ ID NO: 1507 - DNA, 19 bp, Artificial sequence
  Synthetic oligonucleotide
gctatacctaaaacaatct

SEQ ID NO: 1508 - DNA, 18 bp, Artificial sequence
  Synthetic oligonucleotide
gctatacctaaaacaatc

SEQ ID NO: 1509 - DNA, 17 bp, Artificial sequence
  Synthetic oligonucleotide
cccttgtaactaaaaat

SEQ ID NO: 1510 - DNA, 17 bp, Artificial sequence
  Synthetic oligonucleotide
ccccttgtaactaaaaa

SEQ ID NO: 1511 - DNA, 16 bp, Artificial sequence
  Synthetic oligonucleotide
ccccttgtaactaaaa

SEQ ID NO: 1512 - DNA, 16 bp, Artificial sequence
  Synthetic oligonucleotide
accccttgtaactaaa

SEQ ID NO: 1513 - DNA, 16 bp, Artificial sequence
  Synthetic oligonucleotide
caccccttgtaactaa

SEQ ID NO: 1514 - DNA, 16 bp, Artificial sequence
  Synthetic oligonucleotide
acaccccttgtaacta

SEQ ID NO: 1515 - DNA, 17 bp, Artificial sequence
  Synthetic oligonucleotide
gctaaaactaatcatct

SEQ ID NO: 1516 - DNA, 16 bp, Artificial sequence
  Synthetic oligonucleotide
ggctaaaactaatcat

SEQ ID NO: 1517 - DNA, 21 bp, Artificial sequence
  Synthetic oligonucleotide
ttacccttcatatatacatct

SEQ ID NO: 1518 - DNA, 21 bp, Artificial sequence
  Synthetic oligonucleotide
attacccttcatatatacatc

SEQ ID NO: 1519 - DNA, 20 bp, Artificial sequence
  Synthetic oligonucleotide
ttacccttcatatatacatc

SEQ ID NO: 1520 - DNA, 21 bp, Artificial sequence
  Synthetic oligonucleotide
cattacccttcatatatacat

SEQ ID NO: 1521 - DNA, 19 bp, Artificial sequence
  Synthetic oligonucleotide
ttacccttcatatatacat

SEQ ID NO: 1522 - DNA, 20 bp, Artificial sequence
  Synthetic oligonucleotide
attacccttcatatatacat

SEQ ID NO: 1523 - DNA, 21 bp, Artificial sequence
  Synthetic oligonucleotide
acattacccttcatatataca

SEQ ID NO: 1524 - DNA, 18 bp, Artificial sequence
  Synthetic oligonucleotide
ttacccttcatatataca

SEQ ID NO: 1525 - DNA, 20 bp, Artificial sequence
  Synthetic oligonucleotide
cattacccttcatatataca

SEQ ID NO: 1526 - DNA, 19 bp, Artificial sequence
  Synthetic oligonucleotide
attacccttcatatataca

SEQ ID NO: 1527 - DNA, 18 bp, Artificial sequence
  Synthetic oligonucleotide
attacccttcatatatac

SEQ ID NO: 1528 - DNA, 17 bp, Artificial sequence
  Synthetic oligonucleotide
ttacccttcatatatac

SEQ ID NO: 1529 - DNA, 19 bp, Artificial sequence
  Synthetic oligonucleotide
cattacccttcatatatac

SEQ ID NO: 1530 - DNA, 20 bp, Artificial sequence
  Synthetic oligonucleotide
acattacccttcatatatac

SEQ ID NO: 1531 - DNA, 21 bp, Artificial sequence
  Synthetic oligonucleotide
tacattacccttcatatatac

SEQ ID NO: 1532 - DNA, 18 bp, Artificial sequence
  Synthetic oligonucleotide
cattacccttcatatata

SEQ ID NO: 1533 - DNA, 20 bp, Artificial sequence
  Synthetic oligonucleotide
tacattacccttcatatata

SEQ ID NO: 1534 - DNA, 17 bp, Artificial sequence
  Synthetic oligonucleotide
attacccttcatatata

SEQ ID NO: 1535 - DNA, 19 bp, Artificial sequence
  Synthetic oligonucleotide
acattacccttcatatata

SEQ ID NO: 1536 - DNA, 17 bp, Artificial sequence
  Synthetic oligonucleotide
cattacccttcatatat

SEQ ID NO: 1537 - DNA, 18 bp, Artificial sequence
  Synthetic oligonucleotide
acattacccttcatatat

SEQ ID NO: 1538 - DNA, 19 bp, Artificial sequence
  Synthetic oligonucleotide
tacattacccttcatatat

SEQ ID NO: 1539 - DNA, 17 bp, Artificial sequence
  Synthetic oligonucleotide
acattacccttcatata

SEQ ID NO: 1540 - DNA, 18 bp, Artificial sequence
  Synthetic oligonucleotide
tacattacccttcatata

SEQ ID NO: 1541 - DNA, 17 bp, Artificial sequence
  Synthetic oligonucleotide
tacattacccttcatat

SEQ ID NO: 1542 - DNA, 17 bp, Artificial sequence
  Synthetic oligonucleotide
gattcttatacttacta

SEQ ID NO: 1543 - DNA, 17 bp, Artificial sequence
  Synthetic oligonucleotide
tgattcttatacttact

SEQ ID NO: 1544 - DNA, 18 bp, Artificial sequence
  Synthetic oligonucleotide
atgattcttatacttact

SEQ ID NO: 1545 - DNA, 17 bp, Artificial sequence
  Synthetic oligonucleotide
gcctcatttttaccttt

SEQ ID NO: 1546 - DNA, 17 bp, Artificial sequence
  Synthetic oligonucleotide
accaatcttctatttta

SEQ ID NO: 1547 - DNA, 19 bp, Artificial sequence
  Synthetic oligonucleotide
caaccaatcttctatttta

SEQ ID NO: 1548 - DNA, 19 bp, Artificial sequence
  Synthetic oligonucleotide
gcaaccaatcttctatttt

SEQ ID NO: 1549 - DNA, 18 bp, Artificial sequence
  Synthetic oligonucleotide
gcaaccaatcttctattt

SEQ ID NO: 1550 - DNA, 17 bp, Artificial sequence
  Synthetic oligonucleotide
gcaaccaatcttctatt

SEQ ID NO: 1551 - DNA, 18 bp, Artificial sequence
  Synthetic oligonucleotide
tgcaaccaatcttctatt

SEQ ID NO: 1552 - DNA, 17 bp, Artificial sequence
  Synthetic oligonucleotide
taactgcaaccaatctt

SEQ ID NO: 1553 - DNA, 18 bp, Artificial sequence
  Synthetic oligonucleotide
tgaatacaacacacatca

SEQ ID NO: 1554 - DNA, 19 bp, Artificial sequence
  Synthetic oligonucleotide
atgaatacaacacacatca

SEQ ID NO: 1555 - DNA, 19 bp, Artificial sequence
  Synthetic oligonucleotide
taaaaatataactactcct

SEQ ID NO: 1556 - DNA, 19 bp, Artificial sequence
  Synthetic oligonucleotide
gtaaaaatataactactcc

SEQ ID NO: 1557 - DNA, 17 bp, Artificial sequence
  Synthetic oligonucleotide
tcaactgatacccacaa

SEQ ID NO: 1558 - DNA, 18 bp, Artificial sequence
  Synthetic oligonucleotide
tgtcttaacatttttctt

SEQ ID NO: 1559 - DNA, 21 bp, Artificial sequence
  Synthetic oligonucleotide
ccacttcaaacttttaattaa

SEQ ID NO: 1560 - DNA, 20 bp, Artificial sequence
  Synthetic oligonucleotide
ccacttcaaacttttaatta

SEQ ID NO: 1561 - DNA, 21 bp, Artificial sequence
  Synthetic oligonucleotide
cccacttcaaacttttaatta

SEQ ID NO: 1562 - DNA, 19 bp, Artificial sequence
  Synthetic oligonucleotide
ccacttcaaacttttaatt

SEQ ID NO: 1563 - DNA, 20 bp, Artificial sequence
  Synthetic oligonucleotide
cccacttcaaacttttaatt

SEQ ID NO: 1564 - DNA, 21 bp, Artificial sequence
  Synthetic oligonucleotide
acccacttcaaacttttaatt

SEQ ID NO: 1565 - DNA, 18 bp, Artificial sequence
  Synthetic oligonucleotide
ccacttcaaacttttaat

SEQ ID NO: 1566 - DNA, 20 bp, Artificial sequence
  Synthetic oligonucleotide
acccacttcaaacttttaat

SEQ ID NO: 1567 - DNA, 21 bp, Artificial sequence
  Synthetic oligonucleotide
aacccacttcaaacttttaat

SEQ ID NO: 1568 - DNA, 18 bp, Artificial sequence
  Synthetic oligonucleotide
cccacttcaaacttttaa

SEQ ID NO: 1569 - DNA, 19 bp, Artificial sequence
  Synthetic oligonucleotide
acccacttcaaacttttaa

SEQ ID NO: 1570 - DNA, 17 bp, Artificial sequence
  Synthetic oligonucleotide
cccacttcaaactttta

SEQ ID NO: 1571 - DNA, 18 bp, Artificial sequence
  Synthetic oligonucleotide
acccacttcaaactttta

SEQ ID NO: 1572 - DNA, 19 bp, Artificial sequence
  Synthetic oligonucleotide
aacccacttcaaactttta

SEQ ID NO: 1573 - DNA, 17 bp, Artificial sequence
  Synthetic oligonucleotide
acccacttcaaactttt

SEQ ID NO: 1574 - DNA, 18 bp, Artificial sequence
  Synthetic oligonucleotide
aacccacttcaaactttt

SEQ ID NO: 1575 - DNA, 17 bp, Artificial sequence
  Synthetic oligonucleotide
aacccacttcaaacttt

SEQ ID NO: 1576 - DNA, 16 bp, Artificial sequence
  Synthetic oligonucleotide
ggactctattaatcaa

SEQ ID NO: 1577 - DNA, 17 bp, Artificial sequence
  Synthetic oligonucleotide
gaatattctactcttct

SEQ ID NO: 1578 - DNA, 18 bp, Artificial sequence
  Synthetic oligonucleotide
ctgtatttaccaattcaa

SEQ ID NO: 1579 - DNA, 17 bp, Artificial sequence
  Synthetic oligonucleotide
ctgtatttaccaattca

SEQ ID NO: 1580 - DNA, 18 bp, Artificial sequence
  Synthetic oligonucleotide
actgtatttaccaattca

SEQ ID NO: 1581 - DNA, 17 bp, Artificial sequence
  Synthetic oligonucleotide
actgtatttaccaattc

SEQ ID NO: 1582 - DNA, 17 bp, Artificial sequence
  Synthetic oligonucleotide
cactgtatttaccaatt

SEQ ID NO: 1583 - DNA, 17 bp, Artificial sequence
  Synthetic oligonucleotide
tcactgtatttaccaat

SEQ ID NO: 1584 - DNA, 21 bp, Artificial sequence
  Synthetic oligonucleotide
ccaactactttacttttcaaa

SEQ ID NO: 1585 - DNA, 20 bp, Artificial sequence
  Synthetic oligonucleotide
ccaactactttacttttcaa

SEQ ID NO: 1586 - DNA, 21 bp, Artificial sequence
  Synthetic oligonucleotide
accaactactttacttttcaa

SEQ ID NO: 1587 - DNA, 19 bp, Artificial sequence
  Synthetic oligonucleotide
ccaactactttacttttca

SEQ ID NO: 1588 - DNA, 21 bp, Artificial sequence
  Synthetic oligonucleotide
taccaactactttacttttca

SEQ ID NO: 1589 - DNA, 20 bp, Artificial sequence
  Synthetic oligonucleotide
accaactactttacttttca

SEQ ID NO: 1590 - DNA, 20 bp, Artificial sequence
  Synthetic oligonucleotide
taccaactactttacttttc

SEQ ID NO: 1591 - DNA, 19 bp, Artificial sequence
  Synthetic oligonucleotide
gtaccaactactttacttt

SEQ ID NO: 1592 - DNA, 18 bp, Artificial sequence
  Synthetic oligonucleotide
gtaccaactactttactt

SEQ ID NO: 1593 - DNA, 17 bp, Artificial sequence
  Synthetic oligonucleotide
gtaccaactactttact

SEQ ID NO: 1594 - DNA, 18 bp, Artificial sequence
  Synthetic oligonucleotide
tgtaccaactactttact

SEQ ID NO: 1595 - DNA, 18 bp, Artificial sequence
  Synthetic oligonucleotide
ttgtaccaactactttac

SEQ ID NO: 1596 - DNA, 16 bp, Artificial sequence
  Synthetic oligonucleotide
gtaccaactactttac

SEQ ID NO: 1597 - DNA, 17 bp, Artificial sequence
  Synthetic oligonucleotide
tgtaccaactactttac

SEQ ID NO: 1598 - DNA, 17 bp, Artificial sequence
  Synthetic oligonucleotide
ttgtaccaactacttta

SEQ ID NO: 1599 - DNA, 20 bp, Artificial sequence
  Synthetic oligonucleotide
atttcatttttcttttaata

SEQ ID NO: 1600 - DNA, 20 bp, Artificial sequence
  Synthetic oligonucleotide
cctaatttcatttttctttt

SEQ ID NO: 1601 - DNA, 20 bp, Artificial sequence
  Synthetic oligonucleotide
tcctaatttcatttttcttt

SEQ ID NO: 1602 - DNA, 21 bp, Artificial sequence
  Synthetic oligonucleotide
ttcttcattataccatcaaat

SEQ ID NO: 1603 - DNA, 21 bp, Artificial sequence
  Synthetic oligonucleotide
tttcttcattataccatcaaa

SEQ ID NO: 1604 - DNA, 21 bp, Artificial sequence
  Synthetic oligonucleotide
ttttcttcattataccatcaa

SEQ ID NO: 1605 - DNA, 18 bp, Artificial sequence
  Synthetic oligonucleotide
tcttcattataccatcaa

SEQ ID NO: 1606 - DNA, 20 bp, Artificial sequence
  Synthetic oligonucleotide
tttcttcattataccatcaa

SEQ ID NO: 1607 - DNA, 19 bp, Artificial sequence
  Synthetic oligonucleotide
ttcttcattataccatcaa

SEQ ID NO: 1608 - DNA, 21 bp, Artificial sequence
  Synthetic oligonucleotide
atattttcttcattataccat

SEQ ID NO: 1609 - DNA, 20 bp, Artificial sequence
  Synthetic oligonucleotide
atattttcttcattatacca

SEQ ID NO: 1610 - DNA, 21 bp, Artificial sequence
  Synthetic oligonucleotide
aatattttcttcattatacca

SEQ ID NO: 1611 - DNA, 21 bp, Artificial sequence
  Synthetic oligonucleotide
aaatattttcttcattatacc

SEQ ID NO: 1612 - DNA, 19 bp, Artificial sequence
  Synthetic oligonucleotide
atattttcttcattatacc

SEQ ID NO: 1613 - DNA, 20 bp, Artificial sequence
  Synthetic oligonucleotide
aatattttcttcattatacc

SEQ ID NO: 1614 - DNA, 20 bp, Artificial sequence
  Synthetic oligonucleotide
taaatattttcttcattata

SEQ ID NO: 1615 - DNA, 19 bp, Artificial sequence
  Synthetic oligonucleotide
ttttccttcatctacttct

SEQ ID NO: 1616 - DNA, 20 bp, Artificial sequence
  Synthetic oligonucleotide
attttccttcatctacttct

SEQ ID NO: 1617 - DNA, 20 bp, Artificial sequence
  Synthetic oligonucleotide
aattttccttcatctacttc

SEQ ID NO: 1618 - DNA, 18 bp, Artificial sequence
  Synthetic oligonucleotide
agaattttccttcatcta

SEQ ID NO: 1619 - DNA, 18 bp, Artificial sequence
  Synthetic oligonucleotide
cagaattttccttcatct

SEQ ID NO: 1620 - DNA, 18 bp, Artificial sequence
  Synthetic oligonucleotide
tcagaattttccttcatc

SEQ ID NO: 1621 - DNA, 18 bp, Artificial sequence
  Synthetic oligonucleotide
ctagaaatatctcacatt

SEQ ID NO: 1622 - DNA, 17 bp, Artificial sequence
  Synthetic oligonucleotide
ctagaaatatctcacat

SEQ ID NO: 1623 - DNA, 17 bp, Artificial sequence
  Synthetic oligonucleotide
actagaaatatctcaca

SEQ ID NO: 1624 - DNA, 17 bp, Artificial sequence
  Synthetic oligonucleotide
attagccattaatctat

SEQ ID NO: 1625 - DNA, 18 bp, Artificial sequence
  Synthetic oligonucleotide
ttgttacaaaataatcca

SEQ ID NO: 1626 - DNA, 19 bp, Artificial sequence
  Synthetic oligonucleotide
ttattttttacattaacta

SEQ ID NO: 1627 - DNA, 19 bp, Artificial sequence
  Synthetic oligonucleotide
tgccaaaatactaacatca

SEQ ID NO: 1628 - DNA, 18 bp, Artificial sequence
  Synthetic oligonucleotide
gccaaaatactaacatca

SEQ ID NO: 1629 - DNA, 18 bp, Artificial sequence
  Synthetic oligonucleotide
tgccaaaatactaacatc

SEQ ID NO: 1630 - DNA, 16 bp, Artificial sequence
  Synthetic oligonucleotide
gagtacaacacttaca

SEQ ID NO: 1631 - DNA, 18 bp, Artificial sequence
  Synthetic oligonucleotide
cacatccattcattttat

SEQ ID NO: 1632 - DNA, 19 bp, Artificial sequence
  Synthetic oligonucleotide
ccacatccattcattttat

SEQ ID NO: 1633 - DNA, 18 bp, Artificial sequence
  Synthetic oligonucleotide
ccacatccattcatttta

SEQ ID NO: 1634 - DNA, 18 bp, Artificial sequence
  Synthetic oligonucleotide
tatgccacatccattcat

SEQ ID NO: 1635 - DNA, 18 bp, Artificial sequence
  Synthetic oligonucleotide
ttatgccacatccattca

SEQ ID NO: 1636 - DNA, 17 bp, Artificial sequence
  Synthetic oligonucleotide
tatgccacatccattca

SEQ ID NO: 1637 - DNA, 17 bp, Artificial sequence
  Synthetic oligonucleotide
ttatgccacatccattc

SEQ ID NO: 1638 - DNA, 17 bp, Artificial sequence
  Synthetic oligonucleotide
attatgccacatccatt

SEQ ID NO: 1639 - DNA, 18 bp, Artificial sequence
  Synthetic oligonucleotide
agtttcatatttttaatc

SEQ ID NO: 1640 - DNA, 17 bp, Artificial sequence
  Synthetic oligonucleotide
atcactgcacactttcc

SEQ ID NO: 1641 - DNA, 18 bp, Artificial sequence
  Synthetic oligonucleotide
aagctctttccaaattct

SEQ ID NO: 1642 - DNA, 18 bp, Artificial sequence
  Synthetic oligonucleotide
tagttcttaactcttctc

SEQ ID NO: 1643 - DNA, 17 bp, Artificial sequence
  Synthetic oligonucleotide
ttagttcttaactcttc

SEQ ID NO: 1644 - DNA, 17 bp, Artificial sequence
  Synthetic oligonucleotide
agcttcaaatactcaaa

SEQ ID NO: 1645 - DNA, 17 bp, Artificial sequence
  Synthetic oligonucleotide
tttcaaagccacaccta

SEQ ID NO: 1646 - DNA, 19 bp, Artificial sequence
  Synthetic oligonucleotide
aatatcctcattacccatt

SEQ ID NO: 1647 - DNA, 17 bp, Artificial sequence
  Synthetic oligonucleotide
tatcctcattacccatt

SEQ ID NO: 1648 - DNA, 18 bp, Artificial sequence
  Synthetic oligonucleotide
atatcctcattacccatt

SEQ ID NO: 1649 - DNA, 18 bp, Artificial sequence
  Synthetic oligonucleotide
aatatcctcattacccat

SEQ ID NO: 1650 - DNA, 19 bp, Artificial sequence
  Synthetic oligonucleotide
taatatcctcattacccat

SEQ ID NO: 1651 - DNA, 20 bp, Artificial sequence
  Synthetic oligonucleotide
ttaatatcctcattacccat

SEQ ID NO: 1652 - DNA, 17 bp, Artificial sequence
  Synthetic oligonucleotide
atatcctcattacccat

SEQ ID NO: 1653 - DNA, 17 bp, Artificial sequence
  Synthetic oligonucleotide
aatatcctcattaccca

SEQ ID NO: 1654 - DNA, 18 bp, Artificial sequence
  Synthetic oligonucleotide
taatatcctcattaccca

SEQ ID NO: 1655 - DNA, 20 bp, Artificial sequence
  Synthetic oligonucleotide
tttaatatcctcattaccca

SEQ ID NO: 1656 - DNA, 19 bp, Artificial sequence
  Synthetic oligonucleotide
ttaatatcctcattaccca

SEQ ID NO: 1657 - DNA, 20 bp, Artificial sequence
  Synthetic oligonucleotide
atttaatatcctcattaccc

SEQ ID NO: 1658 - DNA, 17 bp, Artificial sequence
  Synthetic oligonucleotide
taatatcctcattaccc

SEQ ID NO: 1659 - DNA, 18 bp, Artificial sequence
  Synthetic oligonucleotide
ttaatatcctcattaccc

SEQ ID NO: 1660 - DNA, 19 bp, Artificial sequence
  Synthetic oligonucleotide
tttaatatcctcattaccc

SEQ ID NO: 1661 - DNA, 21 bp, Artificial sequence
  Synthetic oligonucleotide
aatttaatatcctcattaccc

SEQ ID NO: 1662 - DNA, 18 bp, Artificial sequence
  Synthetic oligonucleotide
tttaatatcctcattacc

SEQ ID NO: 1663 - DNA, 20 bp, Artificial sequence
  Synthetic oligonucleotide
aatttaatatcctcattacc

SEQ ID NO: 1664 - DNA, 17 bp, Artificial sequence
  Synthetic oligonucleotide
ttaatatcctcattacc

SEQ ID NO: 1665 - DNA, 21 bp, Artificial sequence
  Synthetic oligonucleotide
aaatttaatatcctcattacc

SEQ ID NO: 1666 - DNA, 19 bp, Artificial sequence
  Synthetic oligonucleotide
atttaatatcctcattacc

SEQ ID NO: 1667 - DNA, 21 bp, Artificial sequence
  Synthetic oligonucleotide
taaatttaatatcctcattac

SEQ ID NO: 1668 - DNA, 21 bp, Artificial sequence
  Synthetic oligonucleotide
ttaaatttaatatcctcatta

SEQ ID NO: 1669 - DNA, 21 bp, Artificial sequence
  Synthetic oligonucleotide
cttaaatttaatatcctcatt

SEQ ID NO: 1670 - DNA, 21 bp, Artificial sequence
  Synthetic oligonucleotide
tcttaaatttaatatcctcat

SEQ ID NO: 1671 - DNA, 20 bp, Artificial sequence
  Synthetic oligonucleotide
tcttaaatttaatatcctca

SEQ ID NO: 1672 - DNA, 21 bp, Artificial sequence
  Synthetic oligonucleotide
ttcttaaatttaatatcctca

SEQ ID NO: 1673 - DNA, 20 bp, Artificial sequence
  Synthetic oligonucleotide
ttcttaaatttaatatcctc

SEQ ID NO: 1674 - DNA, 19 bp, Artificial sequence
  Synthetic oligonucleotide
tcttaaatttaatatcctc

SEQ ID NO: 1675 - DNA, 19 bp, Artificial sequence
  Synthetic oligonucleotide
ttcttaaatttaatatcct

SEQ ID NO: 1676 - DNA, 18 bp, Artificial sequence
  Synthetic oligonucleotide
tcttaaatttaatatcct

SEQ ID NO: 1677 - DNA, 17 bp, Artificial sequence
  Synthetic oligonucleotide
aatagcctttattctac

SEQ ID NO: 1678 - DNA, 18 bp, Artificial sequence
  Synthetic oligonucleotide
cagcaacaattattaata

SEQ ID NO: 1679 - DNA, 18 bp, Artificial sequence
  Synthetic oligonucleotide
ccagcaacaattattaat

SEQ ID NO: 1680 - DNA, 18 bp, Artificial sequence
  Synthetic oligonucleotide
accagcaacaattattaa

SEQ ID NO: 1681 - DNA, 17 bp, Artificial sequence
  Synthetic oligonucleotide
accagcaacaattatta

SEQ ID NO: 1682 - DNA, 17 bp, Artificial sequence
  Synthetic oligonucleotide
taccagcaacaattatt

SEQ ID NO: 1683 - DNA, 20 bp, Artificial sequence
  Synthetic oligonucleotide
ccccaaatctaaaacacttc

SEQ ID NO: 1684 - DNA, 21 bp, Artificial sequence
  Synthetic oligonucleotide
aaccccaaatctaaaacactt

SEQ ID NO: 1685 - DNA, 19 bp, Artificial sequence
  Synthetic oligonucleotide
ccccaaatctaaaacactt

SEQ ID NO: 1686 - DNA, 20 bp, Artificial sequence
  Synthetic oligonucleotide
aaccccaaatctaaaacact

SEQ ID NO: 1687 - DNA, 19 bp, Artificial sequence
  Synthetic oligonucleotide
accccaaatctaaaacact

SEQ ID NO: 1688 - DNA, 18 bp, Artificial sequence
  Synthetic oligonucleotide
accccaaatctaaaacac

SEQ ID NO: 1689 - DNA, 19 bp, Artificial sequence
  Synthetic oligonucleotide
gcaaatattcacaaatcct

SEQ ID NO: 1690 - DNA, 21 bp, Artificial sequence
  Synthetic oligonucleotide
actatttaacacacattatca

SEQ ID NO: 1691 - DNA, 20 bp, Artificial sequence
  Synthetic oligonucleotide
ctatttaacacacattatca

SEQ ID NO: 1692 - DNA, 21 bp, Artificial sequence
  Synthetic oligonucleotide
tactatttaacacacattatc

SEQ ID NO: 1693 - DNA, 20 bp, Artificial sequence
  Synthetic oligonucleotide
actatttaacacacattatc

SEQ ID NO: 1694 - DNA, 20 bp, Artificial sequence
  Synthetic oligonucleotide
tactatttaacacacattat

SEQ ID NO: 1695 - DNA, 21 bp, Artificial sequence
  Synthetic oligonucleotide
ctactatttaacacacattat

SEQ ID NO: 1696 - DNA, 20 bp, Artificial sequence
  Synthetic oligonucleotide
ctactatttaacacacatta

SEQ ID NO: 1697 - DNA, 21 bp, Artificial sequence
  Synthetic oligonucleotide
actactatttaacacacatta

SEQ ID NO: 1698 - DNA, 19 bp, Artificial sequence
  Synthetic oligonucleotide
ctactatttaacacacatt

SEQ ID NO: 1699 - DNA, 20 bp, Artificial sequence
  Synthetic oligonucleotide
actactatttaacacacatt

SEQ ID NO: 1700 - DNA, 19 bp, Artificial sequence
  Synthetic oligonucleotide
actactatttaacacacat

SEQ ID NO: 1701 - DNA, 17 bp, Artificial sequence
  Synthetic oligonucleotide
ctactatttaacacaca

SEQ ID NO: 1702 - DNA, 18 bp, Artificial sequence
  Synthetic oligonucleotide
actactatttaacacaca

SEQ ID NO: 1703 - DNA, 17 bp, Artificial sequence
  Synthetic oligonucleotide
tatagacccttaatatt

SEQ ID NO: 1704 - DNA, 17 bp, Artificial sequence
  Synthetic oligonucleotide
ttatagacccttaatat

SEQ ID NO: 1705 - DNA, 21 bp, Artificial sequence
  Synthetic oligonucleotide
catcacaaaataacctatcat

SEQ ID NO: 1706 - DNA, 21 bp, Artificial sequence
  Synthetic oligonucleotide
tcatcacaaaataacctatca

SEQ ID NO: 1707 - DNA, 21 bp, Artificial sequence
  Synthetic oligonucleotide
ttcatcacaaaataacctatc

SEQ ID NO: 1708 - DNA, 19 bp, Artificial sequence
  Synthetic oligonucleotide
ttcatcacaaaataaccta

SEQ ID NO: 1709 - DNA, 20 bp, Artificial sequence
  Synthetic oligonucleotide
tttcatcacaaaataaccta

SEQ ID NO: 1710 - DNA, 18 bp, Artificial sequence
  Synthetic oligonucleotide
tcatcacaaaataaccta

SEQ ID NO: 1711 - DNA, 21 bp, Artificial sequence
  Synthetic oligonucleotide
ttttcatcacaaaataaccta

SEQ ID NO: 1712 - DNA, 21 bp, Artificial sequence
  Synthetic oligonucleotide
attttcatcacaaaataacct

SEQ ID NO: 1713 - DNA, 21 bp, Artificial sequence
  Synthetic oligonucleotide
tattttcatcacaaaataacc

SEQ ID NO: 1714 - DNA, 19 bp, Artificial sequence
  Synthetic oligonucleotide
gtattttcatcacaaaata

SEQ ID NO: 1715 - DNA, 16 bp, Artificial sequence
  Synthetic oligonucleotide
ttacctagatcactcc

SEQ ID NO: 1716 - DNA, 16 bp, Artificial sequence
  Synthetic oligonucleotide
cttacctagatcactc

SEQ ID NO: 1717 - DNA, 16 bp, Artificial sequence
  Synthetic oligonucleotide
ccttacctagatcact

SEQ ID NO: 1718 - DNA, 17 bp, Artificial sequence
  Synthetic oligonucleotide
taactgctccttaatcc

SEQ ID NO: 1719 - DNA, 17 bp, Artificial sequence
  Synthetic oligonucleotide
tctagcaatcctctcct

SEQ ID NO: 1720 - DNA, 17 bp, Artificial sequence
  Synthetic oligonucleotide
ttctagcaatcctctcc

SEQ ID NO: 1721 - DNA, 21 bp, Artificial sequence
  Synthetic oligonucleotide
ttttcacctactaatattcat

SEQ ID NO: 1722 - DNA, 20 bp, Artificial sequence
  Synthetic oligonucleotide
tttcacctactaatattcat

SEQ ID NO: 1723 - DNA, 19 bp, Artificial sequence
  Synthetic oligonucleotide
ttcacctactaatattcat

SEQ ID NO: 1724 - DNA, 18 bp, Artificial sequence
  Synthetic oligonucleotide
tcacctactaatattcat

SEQ ID NO: 1725 - DNA, 17 bp, Artificial sequence
  Synthetic oligonucleotide
tcacctactaatattca

SEQ ID NO: 1726 - DNA, 19 bp, Artificial sequence
  Synthetic oligonucleotide
tttcacctactaatattca

SEQ ID NO: 1727 - DNA, 20 bp, Artificial sequence
  Synthetic oligonucleotide
ttttcacctactaatattca

SEQ ID NO: 1728 - DNA, 21 bp, Artificial sequence
  Synthetic oligonucleotide
tttttcacctactaatattca

SEQ ID NO: 1729 - DNA, 18 bp, Artificial sequence
  Synthetic oligonucleotide
ttcacctactaatattca

SEQ ID NO: 1730 - DNA, 21 bp, Artificial sequence
  Synthetic oligonucleotide
atttttcacctactaatattc

SEQ ID NO: 1731 - DNA, 20 bp, Artificial sequence
  Synthetic oligonucleotide
tttttcacctactaatattc

SEQ ID NO: 1732 - DNA, 21 bp, Artificial sequence
  Synthetic oligonucleotide
tatttttcacctactaatatt

SEQ ID NO: 1733 - DNA, 20 bp, Artificial sequence
  Synthetic oligonucleotide
tatttttcacctactaatat

SEQ ID NO: 1734 - DNA, 21 bp, Artificial sequence
  Synthetic oligonucleotide
ttatttttcacctactaatat

SEQ ID NO: 1735 - DNA, 20 bp, Artificial sequence
  Synthetic oligonucleotide
ttatttttcacctactaata

SEQ ID NO: 1736 - DNA, 19 bp, Artificial sequence
  Synthetic oligonucleotide
tatttttcacctactaata

SEQ ID NO: 1737 - DNA, 21 bp, Artificial sequence
  Synthetic oligonucleotide
tttatttttcacctactaata

SEQ ID NO: 1738 - DNA, 19 bp, Artificial sequence
  Synthetic oligonucleotide
tttatttttcacctactaa

SEQ ID NO: 1739 - DNA, 18 bp, Artificial sequence
  Synthetic oligonucleotide
tttatttttcacctacta

SEQ ID NO: 1740 - DNA, 20 bp, Artificial sequence
  Synthetic oligonucleotide
ctcaacttctactactaatt

SEQ ID NO: 1741 - DNA, 21 bp, Artificial sequence
  Synthetic oligonucleotide
tctcaacttctactactaatt

SEQ ID NO: 1742 - DNA, 21 bp, Artificial sequence
  Synthetic oligonucleotide
ctctcaacttctactactaat

SEQ ID NO: 1743 - DNA, 19 bp, Artificial sequence
  Synthetic oligonucleotide
ctcaacttctactactaat

SEQ ID NO: 1744 - DNA, 20 bp, Artificial sequence
  Synthetic oligonucleotide
tctcaacttctactactaat

SEQ ID NO: 1745 - DNA, 21 bp, Artificial sequence
  Synthetic oligonucleotide
tctctcaacttctactactaa

SEQ ID NO: 1746 - DNA, 18 bp, Artificial sequence
  Synthetic oligonucleotide
ctcaacttctactactaa

SEQ ID NO: 1747 - DNA, 19 bp, Artificial sequence
  Synthetic oligonucleotide
tctcaacttctactactaa

SEQ ID NO: 1748 - DNA, 17 bp, Artificial sequence
  Synthetic oligonucleotide
ctcaacttctactacta

SEQ ID NO: 1749 - DNA, 21 bp, Artificial sequence
  Synthetic oligonucleotide
ttctctcaacttctactacta

SEQ ID NO: 1750 - DNA, 20 bp, Artificial sequence
  Synthetic oligonucleotide
tctctcaacttctactacta

SEQ ID NO: 1751 - DNA, 18 bp, Artificial sequence
  Synthetic oligonucleotide
tctcaacttctactacta

SEQ ID NO: 1752 - DNA, 19 bp, Artificial sequence
  Synthetic oligonucleotide
ctctcaacttctactacta

SEQ ID NO: 1753 - DNA, 18 bp, Artificial sequence
  Synthetic oligonucleotide
ctctcaacttctactact

SEQ ID NO: 1754 - DNA, 17 bp, Artificial sequence
  Synthetic oligonucleotide
tctcaacttctactact

SEQ ID NO: 1755 - DNA, 19 bp, Artificial sequence
  Synthetic oligonucleotide
tctctcaacttctactact

SEQ ID NO: 1756 - DNA, 21 bp, Artificial sequence
  Synthetic oligonucleotide
tttctctcaacttctactact

SEQ ID NO: 1757 - DNA, 20 bp, Artificial sequence
  Synthetic oligonucleotide
ttctctcaacttctactact

SEQ ID NO: 1758 - DNA, 20 bp, Artificial sequence
  Synthetic oligonucleotide
tttctctcaacttctactac

SEQ ID NO: 1759 - DNA, 17 bp, Artificial sequence
  Synthetic oligonucleotide
ctctcaacttctactac

SEQ ID NO: 1760 - DNA, 19 bp, Artificial sequence
  Synthetic oligonucleotide
ttctctcaacttctactac

SEQ ID NO: 1761 - DNA, 21 bp, Artificial sequence
  Synthetic oligonucleotide
ttttctctcaacttctactac

SEQ ID NO: 1762 - DNA, 18 bp, Artificial sequence
  Synthetic oligonucleotide
tctctcaacttctactac

SEQ ID NO: 1763 - DNA, 19 bp, Artificial sequence
  Synthetic oligonucleotide
tttctctcaacttctacta

SEQ ID NO: 1764 - DNA, 20 bp, Artificial sequence
  Synthetic oligonucleotide
ttttctctcaacttctacta

SEQ ID NO: 1765 - DNA, 21 bp, Artificial sequence
  Synthetic oligonucleotide
tttttctctcaacttctacta

SEQ ID NO: 1766 - DNA, 17 bp, Artificial sequence
  Synthetic oligonucleotide
tctctcaacttctacta

SEQ ID NO: 1767 - DNA, 18 bp, Artificial sequence
  Synthetic oligonucleotide
ttctctcaacttctacta

SEQ ID NO: 1768 - DNA, 18 bp, Artificial sequence
  Synthetic oligonucleotide
tttctctcaacttctact

SEQ ID NO: 1769 - DNA, 19 bp, Artificial sequence
  Synthetic oligonucleotide
ttttctctcaacttctact

SEQ ID NO: 1770 - DNA, 21 bp, Artificial sequence
  Synthetic oligonucleotide
ctttttctctcaacttctact

SEQ ID NO: 1771 - DNA, 20 bp, Artificial sequence
  Synthetic oligonucleotide
tttttctctcaacttctact

SEQ ID NO: 1772 - DNA, 20 bp, Artificial sequence
  Synthetic oligonucleotide
ctttttctctcaacttctac

SEQ ID NO: 1773 - DNA, 21 bp, Artificial sequence
  Synthetic oligonucleotide
actttttctctcaacttctac

SEQ ID NO: 1774 - DNA, 18 bp, Artificial sequence
  Synthetic oligonucleotide
ttttctctcaacttctac

SEQ ID NO: 1775 - DNA, 19 bp, Artificial sequence
  Synthetic oligonucleotide
tttttctctcaacttctac

SEQ ID NO: 1776 - DNA, 19 bp, Artificial sequence
  Synthetic oligonucleotide
ctttttctctcaacttcta

SEQ ID NO: 1777 - DNA, 21 bp, Artificial sequence
  Synthetic oligonucleotide
tactttttctctcaacttcta

SEQ ID NO: 1778 - DNA, 20 bp, Artificial sequence
  Synthetic oligonucleotide
actttttctctcaacttcta

SEQ ID NO: 1779 - DNA, 18 bp, Artificial sequence
  Synthetic oligonucleotide
tttttctctcaacttcta

SEQ ID NO: 1780 - DNA, 20 bp, Artificial sequence
  Synthetic oligonucleotide
tactttttctctcaacttct

SEQ ID NO: 1781 - DNA, 21 bp, Artificial sequence
  Synthetic oligonucleotide
ttactttttctctcaacttct

SEQ ID NO: 1782 - DNA, 20 bp, Artificial sequence
  Synthetic oligonucleotide
ttactttttctctcaacttc

SEQ ID NO: 1783 - DNA, 19 bp, Artificial sequence
  Synthetic oligonucleotide
tactttttctctcaacttc

SEQ ID NO: 1784 - DNA, 18 bp, Artificial sequence
  Synthetic oligonucleotide
actttttctctcaacttc

SEQ ID NO: 1785 - DNA, 19 bp, Artificial sequence
  Synthetic oligonucleotide
ttactttttctctcaactt

SEQ ID NO: 1786 - DNA, 18 bp, Artificial sequence
  Synthetic oligonucleotide
tactttttctctcaactt

SEQ ID NO: 1787 - DNA, 18 bp, Artificial sequence
  Synthetic oligonucleotide
ttactttttctctcaact

SEQ ID NO: 1788 - DNA, 19 bp, Artificial sequence
  Synthetic oligonucleotide
gttactttttctctcaact

SEQ ID NO: 1789 - DNA, 18 bp, Artificial sequence
  Synthetic oligonucleotide
gttactttttctctcaac

SEQ ID NO: 1790 - DNA, 17 bp, Artificial sequence
  Synthetic oligonucleotide
gttactttttctctcaa

SEQ ID NO: 1791 - DNA, 18 bp, Artificial sequence
  Synthetic oligonucleotide
agttactttttctctcaa

SEQ ID NO: 1792 - DNA, 20 bp, Artificial sequence
  Synthetic oligonucleotide
cttttacattcccattaaca

SEQ ID NO: 1793 - DNA, 21 bp, Artificial sequence
  Synthetic oligonucleotide
cacttttacattcccattaac

SEQ ID NO: 1794 - DNA, 19 bp, Artificial sequence
  Synthetic oligonucleotide
cttttacattcccattaac

SEQ ID NO: 1795 - DNA, 20 bp, Artificial sequence
  Synthetic oligonucleotide
acttttacattcccattaac

SEQ ID NO: 1796 - DNA, 19 bp, Artificial sequence
  Synthetic oligonucleotide
acttttacattcccattaa

SEQ ID NO: 1797 - DNA, 18 bp, Artificial sequence
  Synthetic oligonucleotide
cttttacattcccattaa

SEQ ID NO: 1798 - DNA, 20 bp, Artificial sequence
  Synthetic oligonucleotide
cacttttacattcccattaa

SEQ ID NO: 1799 - DNA, 21 bp, Artificial sequence
  Synthetic oligonucleotide
tacacttttacattcccatta

SEQ ID NO: 1800 - DNA, 18 bp, Artificial sequence
  Synthetic oligonucleotide
acttttacattcccatta

SEQ ID NO: 1801 - DNA, 19 bp, Artificial sequence
  Synthetic oligonucleotide
cacttttacattcccatta

SEQ ID NO: 1802 - DNA, 20 bp, Artificial sequence
  Synthetic oligonucleotide
acacttttacattcccatta

SEQ ID NO: 1803 - DNA, 18 bp, Artificial sequence
  Synthetic oligonucleotide
cacttttacattcccatt

SEQ ID NO: 1804 - DNA, 20 bp, Artificial sequence
  Synthetic oligonucleotide
tacacttttacattcccatt

SEQ ID NO: 1805 - DNA, 19 bp, Artificial sequence
  Synthetic oligonucleotide
acacttttacattcccatt

SEQ ID NO: 1806 - DNA, 19 bp, Artificial sequence
  Synthetic oligonucleotide
tacacttttacattcccat

SEQ ID NO: 1807 - DNA, 18 bp, Artificial sequence
  Synthetic oligonucleotide
tacacttttacattccca

SEQ ID NO: 1808 - DNA, 19 bp, Artificial sequence
  Synthetic oligonucleotide
gtacacttttacattccca

SEQ ID NO: 1809 - DNA, 18 bp, Artificial sequence
  Synthetic oligonucleotide
gtacacttttacattccc

SEQ ID NO: 1810 - DNA, 17 bp, Artificial sequence
  Synthetic oligonucleotide
tacacttttacattccc

SEQ ID NO: 1811 - DNA, 19 bp, Artificial sequence
  Synthetic oligonucleotide
tgtacacttttacattccc

SEQ ID NO: 1812 - DNA, 18 bp, Artificial sequence
  Synthetic oligonucleotide
tgtacacttttacattcc

SEQ ID NO: 1813 - DNA, 18 bp, Artificial sequence
  Synthetic oligonucleotide
ctgtacacttttacattc

SEQ ID NO: 1814 - DNA, 18 bp, Artificial sequence
  Synthetic oligonucleotide
atcttatttacatcttcc

SEQ ID NO: 1815 - DNA, 19 bp, Artificial sequence
  Synthetic oligonucleotide
gaatcttatttacatcttc

SEQ ID NO: 1816 - DNA, 18 bp, Artificial sequence
  Synthetic oligonucleotide
gaatcttatttacatctt

SEQ ID NO: 1817 - DNA, 18 bp, Artificial sequence
  Synthetic oligonucleotide
tgaatcttatttacatct

SEQ ID NO: 1818 - DNA, 17 bp, Artificial sequence
  Synthetic oligonucleotide
attcagctttttcaatc

SEQ ID NO: 1819 - DNA, 20 bp, Artificial sequence
  Synthetic oligonucleotide
ttaattttcccttcactcct

SEQ ID NO: 1820 - DNA, 19 bp, Artificial sequence
  Synthetic oligonucleotide
ttaattttcccttcactcc

SEQ ID NO: 1821 - DNA, 18 bp, Artificial sequence
  Synthetic oligonucleotide
ttaattttcccttcactc

SEQ ID NO: 1822 - DNA, 19 bp, Artificial sequence
  Synthetic oligonucleotide
gttaattttcccttcactc

SEQ ID NO: 1823 - DNA, 21 bp, Artificial sequence
  Synthetic oligonucleotide
caaaattacttcttttatcat

SEQ ID NO: 1824 - DNA, 21 bp, Artificial sequence
  Synthetic oligonucleotide
ccaaaattacttcttttatca

SEQ ID NO: 1825 - DNA, 21 bp, Artificial sequence
  Synthetic oligonucleotide
tccaaaattacttcttttatc

SEQ ID NO: 1826 - DNA, 20 bp, Artificial sequence
  Synthetic oligonucleotide
tccaaaattacttcttttat

SEQ ID NO: 1827 - DNA, 19 bp, Artificial sequence
  Synthetic oligonucleotide
ccaaaattacttcttttat

SEQ ID NO: 1828 - DNA, 21 bp, Artificial sequence
  Synthetic oligonucleotide
ttccaaaattacttcttttat

SEQ ID NO: 1829 - DNA, 19 bp, Artificial sequence
  Synthetic oligonucleotide
tccaaaattacttctttta

SEQ ID NO: 1830 - DNA, 20 bp, Artificial sequence
  Synthetic oligonucleotide
ttccaaaattacttctttta

SEQ ID NO: 1831 - DNA, 19 bp, Artificial sequence
  Synthetic oligonucleotide
gttccaaaattacttcttt

SEQ ID NO: 1832 - DNA, 18 bp, Artificial sequence
  Synthetic oligonucleotide
gttccaaaattacttctt

SEQ ID NO: 1833 - DNA, 18 bp, Artificial sequence
  Synthetic oligonucleotide
tgttccaaaattacttct

SEQ ID NO: 1834 - DNA, 18 bp, Artificial sequence
  Synthetic oligonucleotide
atgttccaaaattacttc

SEQ ID NO: 1835 - DNA, 20 bp, Artificial sequence
  Synthetic oligonucleotide
catattttactctttttatt

SEQ ID NO: 1836 - DNA, 20 bp, Artificial sequence
  Synthetic oligonucleotide
ccatattttactctttttat

SEQ ID NO: 1837 - DNA, 21 bp, Artificial sequence
  Synthetic oligonucleotide
cccatattttactctttttat

SEQ ID NO: 1838 - DNA, 19 bp, Artificial sequence
  Synthetic oligonucleotide
catattttactctttttat

SEQ ID NO: 1839 - DNA, 20 bp, Artificial sequence
  Synthetic oligonucleotide
cccatattttactcttttta

SEQ ID NO: 1840 - DNA, 19 bp, Artificial sequence
  Synthetic oligonucleotide
ccatattttactcttttta

SEQ ID NO: 1841 - DNA, 21 bp, Artificial sequence
  Synthetic oligonucleotide
acccatattttactcttttta

SEQ ID NO: 1842 - DNA, 18 bp, Artificial sequence
  Synthetic oligonucleotide
ccatattttactcttttt

SEQ ID NO: 1843 - DNA, 19 bp, Artificial sequence
  Synthetic oligonucleotide
cccatattttactcttttt

SEQ ID NO: 1844 - DNA, 20 bp, Artificial sequence
  Synthetic oligonucleotide
acccatattttactcttttt

SEQ ID NO: 1845 - DNA, 21 bp, Artificial sequence
  Synthetic oligonucleotide
tacccatattttactcttttt

SEQ ID NO: 1846 - DNA, 20 bp, Artificial sequence
  Synthetic oligonucleotide
tacccatattttactctttt

SEQ ID NO: 1847 - DNA, 18 bp, Artificial sequence
  Synthetic oligonucleotide
cccatattttactctttt

SEQ ID NO: 1848 - DNA, 19 bp, Artificial sequence
  Synthetic oligonucleotide
acccatattttactctttt

SEQ ID NO: 1849 - DNA, 21 bp, Artificial sequence
  Synthetic oligonucleotide
ttacccatattttactctttt

SEQ ID NO: 1850 - DNA, 19 bp, Artificial sequence
  Synthetic oligonucleotide
tacccatattttactcttt

SEQ ID NO: 1851 - DNA, 18 bp, Artificial sequence
  Synthetic oligonucleotide
acccatattttactcttt

SEQ ID NO: 1852 - DNA, 20 bp, Artificial sequence
  Synthetic oligonucleotide
ttacccatattttactcttt

SEQ ID NO: 1853 - DNA, 21 bp, Artificial sequence
  Synthetic oligonucleotide
tttacccatattttactcttt

SEQ ID NO: 1854 - DNA, 19 bp, Artificial sequence
  Synthetic oligonucleotide
ttacccatattttactctt

SEQ ID NO: 1855 - DNA, 20 bp, Artificial sequence
  Synthetic oligonucleotide
tttacccatattttactctt

SEQ ID NO: 1856 - DNA, 17 bp, Artificial sequence
  Synthetic oligonucleotide
acccatattttactctt

SEQ ID NO: 1857 - DNA, 18 bp, Artificial sequence
  Synthetic oligonucleotide
tacccatattttactctt

SEQ ID NO: 1858 - DNA, 17 bp, Artificial sequence
  Synthetic oligonucleotide
tacccatattttactct

SEQ ID NO: 1859 - DNA, 18 bp, Artificial sequence
  Synthetic oligonucleotide
ttacccatattttactct

SEQ ID NO: 1860 - DNA, 19 bp, Artificial sequence
  Synthetic oligonucleotide
tttacccatattttactct

SEQ ID NO: 1861 - DNA, 17 bp, Artificial sequence
  Synthetic oligonucleotide
ttacccatattttactc

SEQ ID NO: 1862 - DNA, 18 bp, Artificial sequence
  Synthetic oligonucleotide
tttacccatattttactc

SEQ ID NO: 1863 - DNA, 19 bp, Artificial sequence
  Synthetic oligonucleotide
gtttacccatattttactc

SEQ ID NO: 1864 - DNA, 18 bp, Artificial sequence
  Synthetic oligonucleotide
gtttacccatattttact

SEQ ID NO: 1865 - DNA, 18 bp, Artificial sequence
  Synthetic oligonucleotide
tgtttacccatattttac

SEQ ID NO: 1866 - DNA, 17 bp, Artificial sequence
  Synthetic oligonucleotide
gtttacccatattttac

SEQ ID NO: 1867 - DNA, 17 bp, Artificial sequence
  Synthetic oligonucleotide
tgtttacccatatttta

SEQ ID NO: 1868 - DNA, 17 bp, Artificial sequence
  Synthetic oligonucleotide
ttcttgcttcaaccatc

SEQ ID NO: 1869 - DNA, 17 bp, Artificial sequence
  Synthetic oligonucleotide
gttacctccctttatat

SEQ ID NO: 1870 - DNA, 16 bp, Artificial sequence
  Synthetic oligonucleotide
ggttacctccctttat

SEQ ID NO: 1871 - DNA, 16 bp, Artificial sequence
  Synthetic oligonucleotide
aggttacctcccttta

SEQ ID NO: 1872 - DNA, 18 bp, Artificial sequence
  Synthetic oligonucleotide
atgttctctatctctata

SEQ ID NO: 1873 - DNA, 17 bp, Artificial sequence
  Synthetic oligonucleotide
tatgttctctatctcta

SEQ ID NO: 1874 - DNA, 17 bp, Artificial sequence
  Synthetic oligonucleotide
agatcaaactaaaacct

SEQ ID NO: 1875 - DNA, 17 bp, Artificial sequence
  Synthetic oligonucleotide
tgcccaatttcacccaa

SEQ ID NO: 1876 - DNA, 17 bp, Artificial sequence
  Synthetic oligonucleotide
tttgcccaatttcaccc

SEQ ID NO: 1877 - DNA, 17 bp, Artificial sequence
  Synthetic oligonucleotide
ttttgcccaatttcacc

SEQ ID NO: 1878 - DNA, 18 bp, Artificial sequence
  Synthetic oligonucleotide
tgtatatcaacaattcat

SEQ ID NO: 1879 - DNA, 20 bp, Artificial sequence
  Synthetic oligonucleotide
acatttctttaaaatttcca

SEQ ID NO: 1880 - DNA, 21 bp, Artificial sequence
  Synthetic oligonucleotide
cacatttctttaaaatttcca

SEQ ID NO: 1881 - DNA, 21 bp, Artificial sequence
  Synthetic oligonucleotide
ccacatttctttaaaatttcc

SEQ ID NO: 1882 - DNA, 20 bp, Artificial sequence
  Synthetic oligonucleotide
cacatttctttaaaatttcc

SEQ ID NO: 1883 - DNA, 19 bp, Artificial sequence
  Synthetic oligonucleotide
acatttctttaaaatttcc

SEQ ID NO: 1884 - DNA, 20 bp, Artificial sequence
  Synthetic oligonucleotide
ccacatttctttaaaatttc

SEQ ID NO: 1885 - DNA, 21 bp, Artificial sequence
  Synthetic oligonucleotide
accacatttctttaaaatttc

SEQ ID NO: 1886 - DNA, 20 bp, Artificial sequence
  Synthetic oligonucleotide
accacatttctttaaaattt

SEQ ID NO: 1887 - DNA, 20 bp, Artificial sequence
  Synthetic oligonucleotide
acaaaaccacatttctttaa

SEQ ID NO: 1888 - DNA, 18 bp, Artificial sequence
  Synthetic oligonucleotide
ctgttttcaaatcatttc

SEQ ID NO: 1889 - DNA, 19 bp, Artificial sequence
  Synthetic oligonucleotide
gaaccattactattatcaa

SEQ ID NO: 1890 - DNA, 19 bp, Artificial sequence
  Synthetic oligonucleotide
agaaccattactattatca

SEQ ID NO: 1891 - DNA, 18 bp, Artificial sequence
  Synthetic oligonucleotide
agaaccattactattatc

SEQ ID NO: 1892 - DNA, 18 bp, Artificial sequence
  Synthetic oligonucleotide
ctagaaccattactatta

SEQ ID NO: 1893 - DNA, 17 bp, Artificial sequence
  Synthetic oligonucleotide
tagaaccattactatta

SEQ ID NO: 1894 - DNA, 17 bp, Artificial sequence
  Synthetic oligonucleotide
ctagaaccattactatt

SEQ ID NO: 1895 - DNA, 19 bp, Artificial sequence
  Synthetic oligonucleotide
agattaccatctttcaaaa

SEQ ID NO: 1896 - DNA, 18 bp, Artificial sequence
  Synthetic oligonucleotide
agattaccatctttcaaa

SEQ ID NO: 1897 - DNA, 17 bp, Artificial sequence
  Synthetic oligonucleotide
agattaccatctttcaa

SEQ ID NO: 1898 - DNA, 17 bp, Artificial sequence
  Synthetic oligonucleotide
aagattaccatctttca

SEQ ID NO: 1899 - DNA, 18 bp, Artificial sequence
  Synthetic oligonucleotide
catgctcacacattttaa

SEQ ID NO: 1900 - DNA, 17 bp, Artificial sequence
  Synthetic oligonucleotide
cttaagctatctaaaca

SEQ ID NO: 1901 - DNA, 18 bp, Artificial sequence
  Synthetic oligonucleotide
tgaacaattcaacattca

SEQ ID NO: 1902 - DNA, 18 bp, Artificial sequence
  Synthetic oligonucleotide
gatcaaaaaactttccct

SEQ ID NO: 1903 - DNA, 19 bp, Artificial sequence
  Synthetic oligonucleotide
agatcaaaaaactttccct

SEQ ID NO: 1904 - DNA, 18 bp, Artificial sequence
  Synthetic oligonucleotide
agatcaaaaaactttccc

SEQ ID NO: 1905 - DNA, 17 bp, Artificial sequence
  Synthetic oligonucleotide
tcctagatcaaaaaact

SEQ ID NO: 1906 - DNA, 19 bp, Artificial sequence
  Synthetic oligonucleotide
attttttcttctcttttca

SEQ ID NO: 1907 - DNA, 20 bp, Artificial sequence
  Synthetic oligonucleotide
tattttttcttctcttttca

SEQ ID NO: 1908 - DNA, 20 bp, Artificial sequence
  Synthetic oligonucleotide
atattttttcttctcttttc

SEQ ID NO: 1909 - DNA, 18 bp, Artificial sequence
  Synthetic oligonucleotide
tctgctttaaaaactctc

SEQ ID NO: 1910 - DNA, 17 bp, Artificial sequence
  Synthetic oligonucleotide
ctctgctttaaaaactc

SEQ ID NO: 1911 - DNA, 19 bp, Artificial sequence
  Synthetic oligonucleotide
actacacaaacacattcaa

SEQ ID NO: 1912 - DNA, 21 bp, Artificial sequence
  Synthetic oligonucleotide
caaactacacaaacacattca

SEQ ID NO: 1913 - DNA, 21 bp, Artificial sequence
  Synthetic oligonucleotide
acaaactacacaaacacattc

SEQ ID NO: 1914 - DNA, 21 bp, Artificial sequence
  Synthetic oligonucleotide
caacaaactacacaaacacat

SEQ ID NO: 1915 - DNA, 21 bp, Artificial sequence
  Synthetic oligonucleotide
cacaacaaactacacaaacac

SEQ ID NO: 1916 - DNA, 21 bp, Artificial sequence
  Synthetic oligonucleotide
tcacaacaaactacacaaaca

SEQ ID NO: 1917 - DNA, 21 bp, Artificial sequence
  Synthetic oligonucleotide
ttcacaacaaactacacaaac

SEQ ID NO: 1918 - DNA, 21 bp, Artificial sequence
  Synthetic oligonucleotide
atttcacaacaaactacacaa

SEQ ID NO: 1919 - DNA, 21 bp, Artificial sequence
  Synthetic oligonucleotide
caatttcacaacaaactacac

SEQ ID NO: 1920 - DNA, 19 bp, Artificial sequence
  Synthetic oligonucleotide
tgtaacaatttcacaacaa

SEQ ID NO: 1921 - DNA, 18 bp, Artificial sequence
  Synthetic oligonucleotide
tgtaacaatttcacaaca

SEQ ID NO: 1922 - DNA, 17 bp, Artificial sequence
  Synthetic oligonucleotide
ttaagccaaccccacca

SEQ ID NO: 1923 - DNA, 17 bp, Artificial sequence
  Synthetic oligonucleotide
tttaagccaaccccacc

SEQ ID NO: 1924 - DNA, 17 bp, Artificial sequence
  Synthetic oligonucleotide
atttaagccaaccccac

SEQ ID NO: 1925 - DNA, 18 bp, Artificial sequence
  Synthetic oligonucleotide
ccagtaatacaaattata

SEQ ID NO: 1926 - DNA, 17 bp, Artificial sequence
  Synthetic oligonucleotide
cccagtaatacaaatta

SEQ ID NO: 1927 - DNA, 17 bp, Artificial sequence
  Synthetic oligonucleotide
tcccagtaatacaaatt

SEQ ID NO: 1928 - DNA, 17 bp, Artificial sequence
  Synthetic oligonucleotide
atcccagtaatacaaat

SEQ ID NO: 1929 - DNA, 17 bp, Artificial sequence
  Synthetic oligonucleotide
ctactagcatcaccact

SEQ ID NO: 1930 - DNA, 16 bp, Artificial sequence
  Synthetic oligonucleotide
ttctactagcatcacc

SEQ ID NO: 1931 - DNA, 16 bp, Artificial sequence
  Synthetic oligonucleotide
cttctactagcatcac

SEQ ID NO: 1932 - DNA, 21 bp, Artificial sequence
  Synthetic oligonucleotide
taaattactcattaaatccat

SEQ ID NO: 1933 - DNA, 21 bp, Artificial sequence
  Synthetic oligonucleotide
ataaattactcattaaatcca

SEQ ID NO: 1934 - DNA, 20 bp, Artificial sequence
  Synthetic oligonucleotide
taaattactcattaaatcca

SEQ ID NO: 1935 - DNA, 21 bp, Artificial sequence
  Synthetic oligonucleotide
cataaattactcattaaatcc

SEQ ID NO: 1936 - DNA, 18 bp, Artificial sequence
  Synthetic oligonucleotide
gatttatttttctactta

SEQ ID NO: 1937 - DNA, 21 bp, Artificial sequence
  Synthetic oligonucleotide
atacaacaaacaattcacttt

SEQ ID NO: 1938 - DNA, 19 bp, Artificial sequence
  Synthetic oligonucleotide
cgatacaacaaacaattca

SEQ ID NO: 1939 - DNA, 20 bp, Artificial sequence
  Synthetic oligonucleotide
gaacatccacactaacaaca

SEQ ID NO: 1940 - DNA, 18 bp, Artificial sequence
  Synthetic oligonucleotide
acatccacactaacaaca

SEQ ID NO: 1941 - DNA, 19 bp, Artificial sequence
  Synthetic oligonucleotide
gaacatccacactaacaac

SEQ ID NO: 1942 - DNA, 19 bp, Artificial sequence
  Synthetic oligonucleotide
tgaacatccacactaacaa

SEQ ID NO: 1943 - DNA, 19 bp, Artificial sequence
  Synthetic oligonucleotide
ttgaacatccacactaaca

SEQ ID NO: 1944 - DNA, 18 bp, Artificial sequence
  Synthetic oligonucleotide
tgaacatccacactaaca

SEQ ID NO: 1945 - DNA, 18 bp, Artificial sequence
  Synthetic oligonucleotide
cattgaacatccacacta

SEQ ID NO: 1946 - DNA, 17 bp, Artificial sequence
  Synthetic oligonucleotide
attgaacatccacacta

SEQ ID NO: 1947 - DNA, 17 bp, Artificial sequence
  Synthetic oligonucleotide
cattgaacatccacact

SEQ ID NO: 1948 - DNA, 17 bp, Artificial sequence
  Synthetic oligonucleotide
actcattgaacatccac

SEQ ID NO: 1949 - DNA, 20 bp, Artificial sequence
  Synthetic oligonucleotide
tatctttatttaataatctt

SEQ ID NO: 1950 - DNA, 17 bp, Artificial sequence
  Synthetic oligonucleotide
tctcaagcttcactcta

SEQ ID NO: 1951 - DNA, 19 bp, Artificial sequence
  Synthetic oligonucleotide
gacaatatattcctcaatc

SEQ ID NO: 1952 - DNA, 18 bp, Artificial sequence
  Synthetic oligonucleotide
gacaatatattcctcaat

SEQ ID NO: 1953 - DNA, 17 bp, Artificial sequence
  Synthetic oligonucleotide
tcctgtaacaattatac

SEQ ID NO: 1954 - DNA, 18 bp, Artificial sequence
  Synthetic oligonucleotide
acccagaataaaaaccac

SEQ ID NO: 1955 - DNA, 18 bp, Artificial sequence
  Synthetic oligonucleotide
ttccactttcttactccc

SEQ ID NO: 1956 - DNA, 17 bp, Artificial sequence
  Synthetic oligonucleotide
ttccactttcttactcc

SEQ ID NO: 1957 - DNA, 18 bp, Artificial sequence
  Synthetic oligonucleotide
tttccactttcttactcc

SEQ ID NO: 1958 - DNA, 17 bp, Artificial sequence
  Synthetic oligonucleotide
tttccactttcttactc

SEQ ID NO: 1959 - DNA, 17 bp, Artificial sequence
  Synthetic oligonucleotide
atccctttaccactttt

SEQ ID NO: 1960 - DNA, 18 bp, Artificial sequence
  Synthetic oligonucleotide
catccctttaccactttt

SEQ ID NO: 1961 - DNA, 18 bp, Artificial sequence
  Synthetic oligonucleotide
tcatccctttaccacttt

SEQ ID NO: 1962 - DNA, 17 bp, Artificial sequence
  Synthetic oligonucleotide
tcatccctttaccactt

SEQ ID NO: 1963 - DNA, 18 bp, Artificial sequence
  Synthetic oligonucleotide
ctcatccctttaccactt

SEQ ID NO: 1964 - DNA, 16 bp, Artificial sequence
  Synthetic oligonucleotide
gtctacatctaacccc

SEQ ID NO: 1965 - DNA, 17 bp, Artificial sequence
  Synthetic oligonucleotide
agtctacatctaacccc

SEQ ID NO: 1966 - DNA, 18 bp, Artificial sequence
  Synthetic oligonucleotide
cagtctacatctaacccc

SEQ ID NO: 1967 - DNA, 17 bp, Artificial sequence
  Synthetic oligonucleotide
cagtctacatctaaccc

SEQ ID NO: 1968 - DNA, 18 bp, Artificial sequence
  Synthetic oligonucleotide
tcagtctacatctaaccc

SEQ ID NO: 1969 - DNA, 16 bp, Artificial sequence
  Synthetic oligonucleotide
agtctacatctaaccc

SEQ ID NO: 1970 - DNA, 17 bp, Artificial sequence
  Synthetic oligonucleotide
tcagtctacatctaacc

SEQ ID NO: 1971 - DNA, 18 bp, Artificial sequence
  Synthetic oligonucleotide
ttcagtctacatctaacc

SEQ ID NO: 1972 - DNA, 17 bp, Artificial sequence
  Synthetic oligonucleotide
ttcagtctacatctaac

SEQ ID NO: 1973 - DNA, 17 bp, Artificial sequence
  Synthetic oligonucleotide
tttcagtctacatctaa

SEQ ID NO: 1974 - DNA, 19 bp, Artificial sequence
  Synthetic oligonucleotide
agttttaaccacacctcct

SEQ ID NO: 1975 - DNA, 17 bp, Artificial sequence
  Synthetic oligonucleotide
gttttaaccacacctcc

SEQ ID NO: 1976 - DNA, 18 bp, Artificial sequence
  Synthetic oligonucleotide
agttttaaccacacctcc

SEQ ID NO: 1977 - DNA, 17 bp, Artificial sequence
  Synthetic oligonucleotide
agttttaaccacacctc

SEQ ID NO: 1978 - DNA, 16 bp, Artificial sequence
  Synthetic oligonucleotide
gagttttaaccacacc

SEQ ID NO: 1979 - DNA, 18 bp, Artificial sequence
  Synthetic oligonucleotide
cagatcttctctttattt

SEQ ID NO: 1980 - DNA, 19 bp, Artificial sequence
  Synthetic oligonucleotide
tgttttcaacaaaacatca

SEQ ID NO: 1981 - DNA, 18 bp, Artificial sequence
  Synthetic oligonucleotide
tgttttcaacaaaacatc

SEQ ID NO: 1982 - DNA, 18 bp, Artificial sequence
  Synthetic oligonucleotide
ctgttttcaacaaaacat

SEQ ID NO: 1983 - DNA, 18 bp, Artificial sequence
  Synthetic oligonucleotide
tctgttttcaacaaaaca

SEQ ID NO: 1984 - DNA, 18 bp, Artificial sequence
  Synthetic oligonucleotide
atctttctaaaacttacc

SEQ ID NO: 1985 - DNA, 18 bp, Artificial sequence
  Synthetic oligonucleotide
cagaatctttctaaaact

SEQ ID NO: 1986 - DNA, 17 bp, Artificial sequence
  Synthetic oligonucleotide
ctacagaatctttctaa

SEQ ID NO: 1987 - DNA, 19 bp, Artificial sequence
  Synthetic oligonucleotide
atttccctttatttccctt

SEQ ID NO: 1988 - DNA, 18 bp, Artificial sequence
  Synthetic oligonucleotide
gtatttccctttatttcc

SEQ ID NO: 1989 - DNA, 27 bp, artificial
  FAM labelled probe
agaaacctaactcatcagtggctgcaa

SEQ ID NO: 1990 - DNA, 21 bp, artificial
  Primer
gaacaggatagacacgatggc

SEQ ID NO: 1991 - DNA, 19 bp, artificial
  Primer
agagactatgcgagagcga

SEQ ID NO: 1992 - DNA, 18 bp, Homo sapiens
aagatgtaaataagattc

SEQ ID NO: 1993 - DNA, 31 bp, artificial
  Probe
agcctaagatgagagttcaagttgagtttgg

SEQ ID NO: 1994 - DNA, 21 bp, artificial
  Primer
gcgatgtcaataggactccag

SEQ ID NO: 1995 - DNA, 22 bp, artificial
  Primer
ttgttgtaggatatgcccttga

1. An antisense oligonucleotide selected from the group consisting of Compound ID Nos. 1122_107, 1122_156, 1122_91, 1122_154, 1122_155, 1122_157, 1122_158, 1122_167, 1122_172, 1122_175, 1122_294, 1122_296, 1816_13, 1816_15, 1816_28, 1816_41, 1816_42, 1816_43, 1816_60, 1816_61, 1816_64, 1816_65, and 1816_68, or a pharmaceutically acceptable salt thereof.

2. An antisense oligonucleotide according to claim 1 of the following chemical annotation:
(a) ^{[LR]}A_{[sP]}.^{[dR]}A_{[sP]}.^{[dR]}T_{[sP]}.^{[LR][5me]}C_{[sP]}.^{[dR]}T_{[sP]}.^{[LR]}T_{[sP]}.^{[dR]}A_{[sp]}.^{[dR]}T_{[sP]}.^{[dR]}T_{[sP]}.^{[m R]}U_{[sP]}.^{[dR]}(A)_{[sP]}.^{[dR]}C_{[sP]}.^{[dR]}A_{[sP]}.^{[dR]}T_{[sP]}.^{[dR]}C_{[sP]}.^{[dR]}T_{[sP]}.^{[LR]}T_{[sP]}.^{[LR][5me]}C)_{[sP]}.^{[LR][5me]}C (SEQ ID NO:1122, wherein residue 10 is U) (Compound ID No. 1122_91);
(b) ^{[LR]}A_{[sP]}.^{[LR]}A_{[sP]}.^{[mR]}U_{[sP]}.^{[LR][5me]}C_{[sP]}.^{[dR]}T_{[sP]}.^{[dR]}T_{[sP]}.^{[dR]}A_{[sp]}.^{[dR]}T_{[sP]}.^{[dR]}T_{[sP]}.^{[d R]}T_{[sP]}.^{[dR]}A_{[sP]}.^{[dR]}C_{[sP]}.^{[dR]}A_{[sP]}.^{[dR]}T_{[sP]}.^{[dR]}C_{[sP]}.^{[LR]}T_{[sP]}.^{[dR]}T_{[sP]}.^{[LR][5me]}C_{[sP]}.^{[LR][5me]}C (SEQ ID NO:1122, wherein residue 3 is U) (Compound ID No. 1122_107);
(c) ^{[LR]}A_{[sP]}.^{[dR]}A_{[sP]}.^{[dR]}T_{[sP]}.^{[LR][5me]}C_{[sP]}.^{[dR]}T_{[sP]}.^{[LR]}T_{[sP]}.^{[dR]}A_{[sp]}.^{[dR]}T_{[sP]}.^{[dR]}T_{[sP]}.^{[d R]}T_{[sP]}.^{[dR]}A_{[ssP]}.^{[dR]}C_{[sP]}.^{[dR]}A_{[sP]}.^{[dR]}T_{[sP]}.^{[dR]}C_{[sP]}.^{[dR]}T_{[sP]}.^{[LR]}T_{[sP]}.^{[LR][5me]}C_{[sP]}.^{[LR][5me]}C (SEQ ID NO:1122) (Compound ID No. 1122_154);
(d) ^{[LR]}A_{[sP]}.^{[dR]}A_{[sP]}.^{[dR]}T_{[sP]}.^{[LR][5me]}C_{[sP]}.^{[dR]}T_{[sP]}.^{[LR]}T_{[sP]}.^{[dR]}A_{[sp]}.^{[dR]}T_{[sP]}.^{[dR]}T_{[sP]}.^{[d R]}T_{[sP]}.^{[dR]}A_{[sP]}.^{[dR]}C_{[ssP]}.^{[dR]}A_{[sP]}.^{[dR]}T_{[sP]}.^{[dR]}C_{[sP]}.^{[dR]}T_{[sP]}.^{[LR]}T_{[sP]}.^{[LR][5me]}C_{[sP]}.^{[LR][5me]}C (SEQ ID NO:1122) (Compound ID No. 1122_155);
(e) ^{[LR]}A_{[sP]}.^{[dR]}A_{[sP]}.^{[dR]}T_{[sP]}.^{[LR]}[5meC]_{[sP]}.^{[dR]}T_{[sP]}.^{[LR]}T_{[sP]}.^{[dR]}A_{[sp]}.^{[dR]}T_{[sP]}.^{[dR]}T_{[sP]}.^{[dR]}T_{[sP]}.^{[dR]}A_{[sP]}.^{[dR]}C_{[ssP]}.^{[dR]}A_{[ssP]}.^{[dR]}T_{[sP]}.^{[dR]}C_{[sP]}.^{[dR]}T_{[sP]}.^{[LR]}T_{[sP]}.^{[LR][5me]}C_{[sP]}.^{[LR][5me]}C (SEQ ID NO:1122) (Compound ID No. 1122_156);
(f) ^{[LR]}A_{[sP]}.^{[dR]}A_{[sP]}.^{[dR]}T_{[sP]}.^{[LR]}[5meC]_{[sP]}.^{[dR]}T_{[sP]}.^{[LR]}T_{[sP]}.^{[dR]}A_{[sp]}.^{[dR]}T_{[sP]}.^{[dR]}T_{[sP]}.^{[dR]}T_{[sP]}.^{[dR]}A_{[sP]}.^{[dR]}C_{[ssP]}.^{[dR]}A_{[sP]}.^{[dR]}T_{[ssP]}.^{[dR]}C_{[sP]}.^{[dR]}T_{[sP]}.^{[LR]}T_{[sP]}.^{[LR][5me]}C_{[sP]}.^{[LR][5me]}C (SEQ ID NO:1122) (Compound ID No. 1122_157);
(g) ^{[LR]}A_{[sP]}.^{[dR]}A_{[sP]}.^{[dR]}T_{[sP]}.^{[LR][5me]}C_{[sP]}.^{[dR]}T_{[sP]}.^{[LR]}T_{[sP]}.^{[dR]}A_{[sp]}.^{[dR]}T_{[sP]}.^{[dR]}T_{[sP]}.^{[d R]}T_{[sP]}.^{[dR]}A_{[sP]}.^{[dR]}C_{[sP]}.^{[dR]}A_{[sP]}.^{[dR]}T_{[sP]}.^{[dR]}C_{[ssP]}.^{[dR]}T_{[sP]}.^{[LR]}T_{[sP]}.^{[LR][5me]}C_{[sP]}.^{[LR][5me]}C (SEQ ID NO:1122) (Compound ID No. 1122_158);
(h) ^{[LR]}A_{[sP]}.^{[dR]}A_{[sP]}.^{[dR]}T_{[sP]}.^{[LR][5me]}C_{[sP]}.^{[dR]}T_{[sP]}.^{[LR]}T_{[sP]}.^{[MOE]}A_{[sp]}.^{[dR]}T_{[sP]}.^{[dR]}T_{[sP]}.^{[dR]}T_{[sP]}.^{[dR]}A_{[sP]}.^{[dR]}C_{[sP]}.^{[dR]}A_{[sP]}.^{[dR]}T_{[sP]}.^{[dR]}C_{[sP]}.^{[dR]}T_{[sP]}.^{[LR]}T_{[sP]}.^{[LR][5me]}C_{[sP]}.^{[LR][5me]}C (SEQ ID NO:1122) (Compound ID No. 1122_167);
(i) ^{[LR]}A_{[sP]}.^{[dR]}A_{[sP]}.^{[dR]}T_{[sP]}.^{[LR]}[5meC]_{[sP]}.^{[dR]}T_{[sP]}.^{[LR]}T_{[sP]}.^{[dR]}A_{[sp]}.^{[dR]}T_{[sP]}.^{[dR]}T_{[sP]}.^{[dR]}T_{[sP]}.^{[dR]}A_{[sP]}.^{[dR]}C_{[ssP]}.^{[dR]}A_{[sP]}.^{[dR]}T_{[sP]}.^{[mR]}C_{[sP]}.^{[dR]}T_{[sP]}.^{[LR]}T_{[sP]}.^{[LR][5me]}C_{[sP]}.^{[LR][5me]}C (SEQ ID NO:1122) (Compound ID No. 1122_172);
(j) ^{[LR]}A_{[sP]}.^{[dR]}A_{[sP]}.^{[dR]}T_{[sP]}.^{[LR][5me]}C_{[sP]}.^{[dR]}T_{[sP]}.^{[LR]}T_{[sP]}.^{[dR]}A_{[sp]}.^{[dR]}T_{[sP]}.^{[dR]}T_{[sP]}.^{[dR]}T_{[sP]}.^{[dR]}A_{[sP]}.^{[dR]}C_{[sP]}.^{[dR]}A_{[sP]}.^{[dR]}T_{[sP]}.^{[dR]}C_{[sP]}.^{[dR]}T_{[sP]}.^{[LR]}T_{[sP]}.^{[LR][5me]}C_{[sP]}.^{[LR][5me]}C (SEQ ID NO:1122) (Compound ID No. 1122_175);
(k) ^{[LR]}A_{[sP]}.^{[dR]}A_{[sP]}.^{[dR]}T_{[sP]}.^{[LR][5me]}C_{[sP]}.^{[dR]}T_{[sP]}.^{[LR]}T_{[sP]}.^{[dR]}A_{[sp]}.^{[dR]}T_{[sP]}.^{[dR]}T_{[sP]}.^{[dR]}T_{[sP]}.^{[dR]}A_{[sP]}.^{[dR]}C_{[sP]}.^{[dR]}A_{[sP]}.^{[dR]}T_{[sP]}.^{[dR]}C_{[sP]}.^{[dR]}T_{[sP]}.^{[LR]}T_{[sP]}.^{[fR]}C_{[sP]}.^{[LR][5me]}C (SEQ ID NO:1122) (Compound ID No. 1122_294);
(l) ^{[LR]}A_{[sP]}.^{[dR]}A_{[sP]}.^{[dR]}T_{[sP]}.^{[mR]}C_{[sP]}.^{[dR]}T_{[sP]}.^{[LR]}T_{[sP]}.^{[dR]}A_{[sp]}.^{[dR]}T_{[sP]}.^{[dR]}T_{[sP]}.^{[dR]}T_{[s P]}.^{[dR]}A_{[sP]}.^{[dR]}C_{[sP]}.^{[dR]}A_{[sP]}.^{[dR]}T_{[sP]}.^{[dR]}C_{[sP]}.^{[dR]}T_{[sP]}.^{[LR]}T_{[sP]}.^{[LR][5me]}C_{[sP]}.^{[LR][5me]}C (SEQ ID NO:1122) (Compound ID No. 1122_296);
(m) ^{[LR]}G_{[sP]}.^{[LR]}A_{[sP]}.^{[dR]}A_{[sP]}.^{[dR]}T_{[sP]}.^{[LR][5me]}C_{[sP]}.^{[dR]}T_{[sP]}.^{[LR]}T_{[sP]}.^{[LR]}A_{[sP]}.^{[dR]}T_{[sP]}.^{[dR]}T_{[sP]}.^{[dR]}T_{[sP]}.^{[dR]}A_{[ssP]}.^{[dR]}C_{[sP]}.^{[dR]}A_{[sP]}.^{[dR]}T_{[sP]}.^{[LR][5me]}C_{[sP]}.^{[LR]}T_{[sP]}.^{[LR]}T (SEQ ID NO:1816) (Compound ID No. 1816_13);
(n) ^{[LR]}G_{[sP]}.^{[LR]}A_{[sP]}.^{[dR]}A_{[sP]}.^{[dR]}T_{[sP]}.^{[LR][5me]}C_{[sP]}.^{[dR]}T_{[sP]}.^{[LR]}T_{[sP]}.^{[LR]}A_{[sP]}.^{[dR]}T_{[sP]}.^{[dR]}T_{[sP]}.^{[dR]}T_{[sP]}.^{[dR]}A_{[sP]}.^{[dR]}C_{[sP]}.^{[dR]}A_{[ssP]}.^{[dR]}T_{[sP]}.^{[LR][5me]}C_{[sP]}.^{[LR]}T_{[sP]}.^{[LR]}T (SEQ ID NO:1816) (Compound ID No. 1816_15);
(o) ^{[LR]}G_{[sP]}.^{[LR]}A_{[sP]}.^{[dR]}A_{[sP]}.^{[dR]}T_{[sP]}.^{[LR][5me]}C_{[sP]}.^{[dR]}T_{[sP]}.^{[LR]}T_{[sP]}.^{[fR]}A_{[sP]}.^{[dR]}T_{[sP]}.^{[dR]}T_{[sP]}.^{[dR]}T_{[sP]}.^{[dR]}A_{[sP]}.^{[dR]}C_{[sP]}.^{[dR]}A_{[sP]}.^{[dR]}T_{[sP]}.^{[LR][5me]}C_{[sP]}.^{[LR]}T_{[sP]}.^{[LR]}T (SEQ ID NO:1816) (Compound ID No. 1816_28);
(p) ^{[LR]}G_{[sP]}.^{[LR]}A_{[sP]}.^{[dR]}A_{[sP]}.^{[dR]}T_{[sP]}.^{[LR][5me]}C_{[sP]}.^{[dR]}T_{[sP]}.^{[LR]}T_{[sP]}.^{[LR]}A_{[sP]}.^{[dR]}T_{[sP]}.^{[dR]}T_{[sP]}.^{[dR]}T_{[sP]}.^{[dR]}A_{[sP]}.^{[dR]}C_{[sP]}.^{[dR]}A_{[sP]}.^{[dR]}T_{[sP]}.^{[LR][5me]}C_{[sP]}.^{[LR]}T_{[sP]}.^{[LR]}T (SEQ ID NO:1816) (Compound ID No. 1816_41);
(q) ^{[LR]}G_{[sP]}.^{[LR]}A_{[sP]}.^{[dR]}A_{[sP]}.^{[dR]}T_{[sP]}.^{[LR][5me]}C_{[sP]}.^{[dR]}T_{[sP]}.^{[LR]}T_{[sP]}.^{[LR]}A_{[sP]}.^{[dR]}T_{[sP]}.^{[dR]}T_{[sP]}.^{[dR]}T_{[sP]}.^{[dR]}A_{[sP]}.^{[dR]}C_{[sP]}.^{[dR]}A_{[sP]}.^{[dR]}T_{[sP]}.^{[LR][5me]}C_{[sP]}.^{[MOE]}T_{[sP]}.^{[LR]}T (SEQ ID NO:1816) (Compound ID No. 1816_42);
(r) ^{[LR]}G_{[sP]}.^{[LR]}A_{[sP]}.^{[dR]}A_{[sP]}.^{[dR]}T_{[sP]}.^{[LR][5me]}C_{[sP]}.^{[dR]}T_{[sP]}.^{[LR]}T_{[sP]}.^{[LR]}A_{[sP]}.^{[dR]}T_{[sP]}.^{[dR]}T_{[sP]}.^{[dR]}T_{[sP]}.^{[dR]}A_{[sP]}.^{[dR]}C_{[sP]}.^{[dR]}A_{[sP]}.^{[dR]}T_{[sP]}.^{[MOE][5me]}C_{[sP]}.^{[LR]}T_{[sP]}.^{[LR]}T (SEQ ID NO:1816) (Compound ID No. 1816_43);
(s) ^{[LR]}G_{[sP]}.^{[LR]}A_{[sP]}.^{[dR]}A_{[sP]}.^{[dR]}T_{[sP]}.^{[LR][5me]}C_{[sP]}.^{[dR]}T_{[sP]}.^{[LR]}T_{[sP]}.^{[mR]}A_{[sP]}.^{[dR]}T_{[sP]}.^{[dR]}T_{[sP]}.^{[dR]}T_{[sP]}.^{[dR]}A_{[sP]}.^{[dR]}C_{[sP]}.^{[dR]}A_{[sP]}.^{[dR]}T_{[sP]}.^{[LR][5me]}C_{[sP]}.^{[LR]}T_{[sP]}.^{[LR]}T (SEQ ID NO:1816) (Compound ID No. 1816_60);
(t) ^{[LR]}G_{[sP]}.^{[LR]}A_{[sP]}.^{[mR]}A_{[sP]}.^{[dR]}T_{[sP]}.^{[LR][5me]}C_{[sP]}.^{[dR]}T_{[sP]}.^{[LR]}T_{[sP]}.^{[LR]}A_{[sP]}.^{[dR]}T_{[sP]}.^{[dR]}T_{[sP]}.^{[dR]}T_{[sP]}.^{[dR]}A_{[sP]}.^{[dR]}C_{[sP]}.^{[dR]}A_{[sP]}.^{[dR]}T_{[sP]}.^{[LR][5me]}C_{[sP]}.^{[LR]}T_{[sP]}.^{[LR]}T (SEQ ID NO:1816) (Compound ID No. 1816_61);
(u) ^{[LR]}G_{[sP]}.^{[LR]}A_{[sP]}.^{[dR]}A_{[sP]}.^{[dR]}T_{[sP]}.^{[LR][5me]}C_{[sP]}.^{[dR]}T_{[sP]}.^{[LR]}T_{[sP]}.^{[LR]}A_{[sP]}.^{[dR]}T_{[sP]}.^{[dR]}T_{[sP]}.^{[dR]}T_{[sP]}.^{[dR]}A_{[sP]}.^{[dR]}C_{[sP]}.^{[dR]}A_{[sP]}.^{[dR]}T_{[sP]}.^{[fR]}C_{[sP]}.^{[LR]}T_{[sP]}.^{[LR]}T (SEQ ID NO:1816) (Compound ID No. 1816_64);
(v) ^{[LR]}G_{[sP]}.^{[LR]}A_{[sP]}.^{[dR]}A_{[sP]}.^{[dR]}T_{[sP]}.^{[LR][5me]}C_{[sP]}.^{[dR]}T_{[sP]}.^{[LR]}T_{[sP]}.^{[LR]}A_{[sP]}.^{[dR]}T_{[sP]}.^{[dR]}T_{[sP]}.^{[dR]}T_{[sP]}.^{[dR]}A_{[sP]}.^{[dR]}C_{[sP]}.^{[dR]}A_{[sP]}.^{[dR]}T_{[sP]}.^{[mR]}C_{[sP]}.^{[LR]}T_{[sP]}.^{[LR]}T (SEQ ID NO:1816) (Compound ID No. 1816_65); or
(w) ^{[LR]}G_{[sP]}.^{[LR]}A_{[sP]}.^{[dR]}A_{[sP]}.^{[dR]}T_{[sP]}.^{[LR][5me]}C_{[sP]}.^{[dR]}T_{[sP]}.^{[LR]}T_{[sP]}.^{[LR]}A_{[sP]}.^{[dR]}T_{[sP]}.^{[dR]}T_{[sP]}.^{[dR]}T_{[sP]}.^{[dR]}A_{[sP]}.^{[dR]}C_{[sP]}.^{[dR]}A_{[sP]}.^{[dR]}T_{[sP]}.^{[LR][5me]}C_{[sP]}.^{[fR]}U_{[sP]}.^{[LR]}T (SEQ ID NO:1816, wherein residue 17 is U)(Compound ID No. 1816_68),
or is a pharmaceutically acceptable salt thereof, wherein
[LR] is a beta-D-oxy-LNA nucleoside,
[LR][5me]C is a beta-D-oxy-LNA 5-methyl cytosine nucleoside,
[dR] is a DNA nucleoside,
[sP] is a phosphorothioate internucleoside linkage (stereo undefined)
[ssP] is a stereodefined Sp phosphorothioate internucleoside linkage
[mR] is a 2′-O-methyl nucleoside,
[MOE] is a 2′-O-methoxyethyl nucleoside, and
[fR] is a 2′-fluoro nucleoside.

3. The antisense oligonucleotide according to claim 1, which is the antisense oligonucleotide shown in FIG. 12A (Compound ID No. 1122_91); or a pharmaceutically acceptable salt thereof.

4. The antisense oligonucleotide according to claim 1, which is the antisense oligonucleotide shown in FIG. 12B (Compound ID No. 1122_107); or a pharmaceutically acceptable salt thereof.

5. The antisense oligonucleotide according to claim 1, which is the antisense oligonucleotide shown in FIG. 12C (Compound ID No. 1122_154); or a pharmaceutically acceptable salt thereof.

6. The antisense oligonucleotide according to claim 1, which is the antisense oligonucleotide shown in FIG. 12D (Compound ID No. 1122_155); or a pharmaceutically acceptable salt thereof.

7. The antisense oligonucleotide according to claim 1, which is the antisense oligonucleotide shown in FIG. 12E (Compound ID No. 1122_156); or a pharmaceutically acceptable salt thereof.

8. The antisense oligonucleotide according to claim 1, which is the antisense oligonucleotide shown in FIG. 12F (Compound ID No. 1122_157); or a pharmaceutically acceptable salt thereof.

9. The antisense oligonucleotide according to claim 1, which is the antisense oligonucleotide shown in FIG. 12G (Compound ID No. 1122_158); or a pharmaceutically acceptable salt thereof.

10. The antisense oligonucleotide according to claim 1, which is the antisense oligonucleotide shown in FIG. 12H (Compound ID No. 1122_167); or a pharmaceutically acceptable salt thereof.

11. The antisense oligonucleotide according to claim 1, which is the antisense oligonucleotide shown in FIG. 12I (Compound ID No. 1122_172); or a pharmaceutically acceptable salt thereof.

12. The antisense oligonucleotide according to claim 1, which is the antisense oligonucleotide shown in FIG. 12J (Compound ID No. 1122_175); or a pharmaceutically acceptable salt thereof.

13. The antisense oligonucleotide according to claim 1, which is the antisense oligonucleotide shown in FIG. 12K (Compound ID No. 1122_294); or a pharmaceutically acceptable salt thereof.

14. The antisense oligonucleotide according to claim 1, which is the antisense oligonucleotide shown in FIG. 12L (Compound ID No. 1122_296); or a pharmaceutically acceptable salt thereof.

15. The antisense oligonucleotide according to claim 1, which is the antisense oligonucleotide shown in FIG. 12M (Compound ID No. 1816_13); or a pharmaceutically acceptable salt thereof.

16. The antisense oligonucleotide according to claim 1, which is the antisense oligonucleotide shown in FIG. 12N (Compound ID No. 1816_15); or a pharmaceutically acceptable salt thereof.

17. The antisense oligonucleotide according to claim 1, which is the antisense oligonucleotide shown in FIG. 12O (Compound ID No. 1816_28); or a pharmaceutically acceptable salt thereof.

18. The antisense oligonucleotide according to claim 1, which is the antisense oligonucleotide shown in FIG. 12P (Compound ID No. 1816_41); or a pharmaceutically acceptable salt thereof.

19. The antisense oligonucleotide according to claim 1, which is the antisense oligonucleotide shown in FIG. 12Q (Compound ID No. 1816_42); or a pharmaceutically acceptable salt thereof.

20. The antisense oligonucleotide according to claim 1, which is the antisense oligonucleotide shown in FIG. 12R (Compound ID No. 1816_43); or a pharmaceutically acceptable salt thereof.

21. The antisense oligonucleotide according to claim 1, which is the antisense oligonucleotide shown in FIG. 12S (Compound ID No. 1816_60); or a pharmaceutically acceptable salt thereof.

22. The antisense oligonucleotide according to claim 1, which is the antisense oligonucleotide shown in FIG. 12T (Compound ID No. 1816_61); or a pharmaceutically acceptable salt thereof.

23. The antisense oligonucleotide according to claim 1, which is the antisense oligonucleotide shown in FIG. 12U (Compound ID No. 1816_64); or a pharmaceutically acceptable salt thereof.

24. The antisense oligonucleotide according to claim 1, which is the antisense oligonucleotide shown in FIG. 12V (Compound ID No. 1816_65); or a pharmaceutically acceptable salt thereof.

25. The antisense oligonucleotide according to claim 1, which is the antisense oligonucleotide shown in FIG. 12W (Compound ID No. 1816_68); or a pharmaceutically acceptable salt thereof.

26. A conjugate comprising an oligonucleotide according to claim 1, and at least one conjugate moiety covalently attached to said oligonucleotide; or a pharmaceutically acceptable salt thereof.

27. A pharmaceutical composition comprising an oligonucleotide according to claim 1 or a conjugate thereof and a pharmaceutically acceptable diluent, solvent, carrier, salt and/or adjuvant.

28. An in vivo or in vitro method for modulating ATXN3 expression in a target cell which is expressing ATXN3, said method comprising administering an oligonucleotide selected from the group consisting of Compound ID Nos. 1122_91, 1122_107, 1122_154, 1122_155, 1122_156, 1122_157, 1122_158, 1122_167, 1122_172, 1122_175, 1122_294, 1122_296, 1816_13, 1816_15, 1816_28, 1816_41, 1816_42, 1816_43, 1816_60, 1816_61, 1816_64, 1816_65, and 1816_68, a conjugate, a salt, or a pharmaceutical composition thereof in an effective amount to said cell.

29. A method for treating or preventing a disease comprising administering a therapeutically or prophylactically effective amount of an oligonucleotide selected from the group consisting of Compound ID Nos. 1122_91, 1122_107, 1122_154, 1122_155, 1122_156, 1122_157, 1122_158, 1122_167, 1122_172, 1122_175, 1122_294, 1122_296, 1816_13, 1816_15, 1816_28, 1816_41, 1816_42, 1816_43, 1816_60,1816_61,1816_64,1816_65, and 1816_68, a conjugate, a salt, or a pharmaceutical composition thereof to a subject suffering from or susceptible to the disease.

30. The method of claim 29, wherein the disease is spinocerebellar ataxia, such as spinocerebellar ataxia 3, such as Machado-Joseph disease

31. The oligonucleotide, a conjugate, a salt, or a pharmaceutical composition thereof according to claim 1 for use in medicine.

32. The oligonucleotide, a conjugate, a salt, or a pharmaceutical composition thereof according to claim 1 for use in the treatment or prevention of spinocerebellar ataxia, such as spinocerebellar ataxia 3, such as Machado-Joseph disease, (MJD).

33. Use of the oligonucleotide, a conjugate, a salt, or a pharmaceutical composition thereof according to claim 1 for the preparation of a medicament for treatment or prevention of spinocerebellar ataxia, such as spinocerebellar ataxia 3, such as Machado-Joseph disease.
